United States Patent Application Publication US 2025/0051457 A1 - sequence listing, part 3

SEQ ID NO: 30294 - protein, 121 aa, synthetic construct; identical to SEQ ID NO: 30272
  REGION 1..121: note = Description of Artificial Sequence: Synthetic polypeptide

SEQ ID NO: 30295 - DNA, 357 bp, synthetic construct
  misc_feature 1..357: note = Description of Artificial Sequence: Synthetic polynucleotide
  source 1..357: mol_type = other DNA
caggtgcagctgcaggagtcgggcccaggactggtgaagccttcggagaccctgtccctcacctgcactgtctctggtggctccatcagtagttactactggagctggatccggcagcccgccgggaagggactggagtggattgggcgtatcgataccagtgggatcaccaactacaacccctccctcaagagtcgagtcaccatgtcagtcgacacgtccaagaaccagttctccctgaagctgacctctgtgaccgccgcggacacggccgtgtattactgtgcgagagaggggggagtgggagctacgtactttgactactggggccagggaaccctggtcaccgtctcctca

SEQ ID NO: 30296 - protein, 119 aa, synthetic construct
  REGION 1..119: note = Description of Artificial Sequence: Synthetic polypeptide
QVQLQESGPGLVKPSETLSLTCTVSGGSISSYYWSWIRQPAGKGLEWIGRIDTSGITNYNPSLKSRVTMSVDTSKNQFSLKLTSVTAADTAVYYCAREGGVGATYFDYWGQGTLVTVSS

SEQ ID NO: 30297 - DNA, 363 bp, synthetic construct
  misc_feature 1..363: note = Description of Artificial Sequence: Synthetic polynucleotide
  source 1..363: mol_type = other DNA
caggtgcagctggtggagtctgggggaggcgtggtccagcctgggaggtccctgagactctcctgtgcagcgtctggattcaccttcagtagctatggcatgcactgggtccgccaggctccaggcaaggggctggagtgggtggcacttatattctatgatggaagtaataaatactatgcagactccgtgaagggccgattcaccatctccagagacaattccaagaacacgctgtatctgcaaataaacagcctgagagccgaggacacggctgtgtatttctgtgcgcgacgctatagccgcagctgggccgggggtatggacgtctggggccaagggaccgcggtcaccgtctcctca

SEQ ID NO: 30298 - protein, 121 aa, synthetic construct
  REGION 1..121: note = Description of Artificial Sequence: Synthetic polypeptide
QVQLVESGGGVVQPGRSLRLSCAASGFTFSSYGMHWVRQAPGKGLEWVALIFYDGSNKYYADSVKGRFTISRDNSKNTLYLQINSLRAEDTAVYFCARRYSRSWAGGMDVWGQGTAVTVSS

SEQ ID NO: 30299 - DNA, 354 bp, synthetic construct
  misc_feature 1..354: note = Description of Artificial Sequence: Synthetic polynucleotide
  source 1..354: mol_type = other DNA
caggtgcagctggtgcagtctggggctgaggtgaaggagcctggggcctcagtgaaggtctcctgcaaggcttctggatacaccttcaccaattatgatatcaactgggtgcgacaggccactggacaagggcttgagtggatgggatggatgcaccctaacagtggtaacacaggctatgcacagaagttccagggcagagtcaccatgaccaggaatacctccataaacacagcctacatggagctgagcagcctgagatctgaggacacggccgtgtattactgtgcgtatagcagtggctggtacttctttgacaactggggccagggaaccctggtcaccgtctcctca

SEQ ID NO: 30300 - protein, 118 aa, synthetic construct
  REGION 1..118: note = Description of Artificial Sequence: Synthetic polypeptide
QVQLVQSGAEVKEPGASVKVSCKASGYTFTNYDINWVRQATGQGLEWMGWMHPNSGNTGYAQKFQGRVTMTRNTSINTAYMELSSLRSEDTAVYYCAYSSGWYFFDNWGQGTLVTVSS

SEQ ID NO: 30301 - DNA, 354 bp, synthetic construct; identical to SEQ ID NO: 29943
  misc_feature 1..354: note = Description of Artificial Sequence: Synthetic polynucleotide
  source 1..354: mol_type = other DNA

SEQ ID NO: 30302 - protein, 118 aa, synthetic construct; identical to SEQ ID NO: 29944
  REGION 1..118: note = Description of Artificial Sequence: Synthetic polypeptide

SEQ ID NO: 30303 - DNA, 369 bp, synthetic construct
  misc_feature 1..369: note = Description of Artificial Sequence: Synthetic polynucleotide
  source 1..369: mol_type = other DNA
gaggtgaagttgttggagtctgggggaggcttggtacagccgggggggtccctgagactctcctgtgcagcctctggattcacctttagcagctatgccatgagctgggtccgccaggctccagggaaggggctggagtgggtctcagctattagtggtcgtggtggtaacacattctacgcagactccgtgaagggccggttcaccatctccagagacaattccaagaacacgctgtttctgcaaatgaacagcctgagagccgaggacacggccgtatattactgtgcgaaaaggggatttcgatttttggagtggttggggggctttgactactggggccagggaaccctggtcaccgtctcctca

SEQ ID NO: 30304 - protein, 123 aa, synthetic construct
  REGION 1..123: note = Description of Artificial Sequence: Synthetic polypeptide
EVKLLESGGGLVQPGGSLRLSCAASGFTFSSYAMSWVRQAPGKGLEWVSAISGRGGNTFYADSVKGRFTISRDNSKNTLFLQMNSLRAEDTAVYYCAKRGFRFLEWLGGFDYWGQGTLVTVSS

SEQ ID NO: 30305 - DNA, 354 bp, synthetic construct
  misc_feature 1..354: note = Description of Artificial Sequence: Synthetic polynucleotide
  source 1..354: mol_type = other DNA
caggtgcagctggtgcagtctggggctgaggtgaagaagcctggggcctcagtgaaggtctcctgcaaggcttctggatacaccttcaccaattatgatatcaactgggtgcgacaggccactggacaggggcttgagtggatgggatggatgaaccctaacagtggtaacacaggctatgcacagaagttccagggcagagtcaccatgaccaggaacacctccataagcacagcctacatggagctgagcagcctgagatctgaggacacggccgtgtattactgtgcgagtagcagtggctggtactacttcgactactggggccagggaaccctggtcaccgtctcctca

SEQ ID NO: 30306 - protein, 118 aa, synthetic construct; identical to SEQ ID NO: 30190
  REGION 1..118: note = Description of Artificial Sequence: Synthetic polypeptide

SEQ ID NO: 30307 - DNA, 369 bp, synthetic construct
  misc_feature 1..369: note = Description of Artificial Sequence: Synthetic polynucleotide
  source 1..369: mol_type = other DNA
gaggtgcagctgttggagtctgggggaggcttggtacagcctggggggtccctgagactctcttgtgcagcctctggattcacctttaacagctatgccatgagctgggtccgccaggctccagggaaggggctggagtgggtctcagctattagtggtagtggtggtaacacattctacgcagactccgtgaagggccgcttcaccatctccagagacaattccaagaacacgctgtatctgcaaatgaacagcctgagagccgaggacacggccgtatattactgtgcgaaaaaggattatgattacgtttgggggagtccttactttgactactggggccagggaaccctggtcaccgtctcctca

SEQ ID NO: 30308 - protein, 123 aa, synthetic construct
  REGION 1..123: note = Description of Artificial Sequence: Synthetic polypeptide
EVQLLESGGGLVQPGGSLRLSCAASGFTFNSYAMSWVRQAPGKGLEWVSAISGSGGNTFYADSVKGRFTISRDNSKNTLYLQMNSLRAEDTAVYYCAKKDYDYVWGSPYFDYWGQGTLVTVSS

SEQ ID NO: 30309 - DNA, 369 bp, synthetic construct; identical to SEQ ID NO: 30233
  misc_feature 1..369: note = Description of Artificial Sequence: Synthetic polynucleotide
  source 1..369: mol_type = other DNA

SEQ ID NO: 30310 - protein, 123 aa, synthetic construct; identical to SEQ ID NO: 30234
  REGION 1..123: note = Description of Artificial Sequence: Synthetic polypeptide

SEQ ID NO: 30311 - DNA, 366 bp, synthetic construct
  misc_feature 1..366: note = Description of Artificial Sequence: Synthetic polynucleotide
  source 1..366: mol_type = other DNA
gaggtgcagctgttggagtctgggggaggcttggtacagcctggggggtccctgagactctcctgtgcagcctctggattcacctttagcagctatgccatgagctgggtccgccaggctccagggaaggggctggagtgggtctcagctattagtggtcgtggtggtaacacattctacgcagactccgtgaagggccggttcaccatctccagagacaattccaagaacacgctgtatctgcaaatgaacagtctgagagccgaggacacggccgtatattactgtgcgaaacgggtgacggactacggtggtaacgactggttcgacccctggggccagggaaccctggtcaccgtctcctca

SEQ ID NO: 30312 - protein, 122 aa, synthetic construct; identical to SEQ ID NO: 30134
  REGION 1..122: note = Description of Artificial Sequence: Synthetic polypeptide

SEQ ID NO: 30313 - DNA, 363 bp, synthetic construct
  misc_feature 1..363: note = Description of Artificial Sequence: Synthetic polynucleotide
  source 1..363: mol_type = other DNA
caggtgcagctagtggagtctgggggagacgtggtccagcctgggaggtccctgaggctctcctgtgcagcgtctggattcaccttcagtagctatggcatgcactgggtccgccaggctccaggcaaggggctggagtgggtggcaattatatggtatgatggaagtagtaaatactatgcagactccgtgaagggccgattcaccatctccagagacaattccaagaacacgctgtatctgcacatgaacagcctgagagccgaggacacggcagtgtattactgtgcgagagatcgatacgatttttggagtggtcactttgactactggggccagggaaccctggtcaccgtctcctca

SEQ ID NO: 30314 - protein, 121 aa, synthetic construct
  REGION 1..121: note = Description of Artificial Sequence: Synthetic polypeptide
QVQLVESGGDVVQPGRSLRLSCAASGFTFSSYGMHWVRQAPGKGLEWVAIIWYDGSSKYYADSVKGRFTISRDNSKNTLYLHMNSLRAEDTAVYYCARDRYDFWSGHFDYWGQGTLVTVSS

SEQ ID NO: 30315 - DNA, 354 bp, synthetic construct
  misc_feature 1..354: note = Description of Artificial Sequence: Synthetic polynucleotide
  source 1..354: mol_type = other DNA
caggtgcagctggtgcagtctggggctgaggtgaagaagcctggggcctcagtgaaggtctcctgcaaggcttctggatacaccttcaccaattatgatatcaactgggtgcgacaggccactggacaagggcttgagtggatgggatggatgcaccctaacagtggtagtacaggctatgcacagaggttccagggcagagtcaccatgaccaggaacacctccataagcacagcctacatggagctgagcagcctgagatctgaggacacggccgtgtattactgtgcgtttagcagtggctggtactattttgactactggggccagggaaccctggtcaccgtctcctca

SEQ ID NO: 30316 - protein, 118 aa, synthetic construct
  REGION 1..118: note = Description of Artificial Sequence: Synthetic polypeptide
QVQLVQSGAEVKKPGASVKVSCKASGYTFTNYDINWVRQATGQGLEWMGWMHPNSGSTGYAQRFQGRVTMTRNTSISTAYMELSSLRSEDTAVYYCAFSSGWYYFDYWGQGTLVTVSS

SEQ ID NO: 30317 - DNA, 354 bp, synthetic construct; identical to SEQ ID NO: 30287
  misc_feature 1..354: note = Description of Artificial Sequence: Synthetic polynucleotide
  source 1..354: mol_type = other DNA

SEQ ID NO: 30318 - protein, 118 aa, synthetic construct; identical to SEQ ID NO: 30000
  REGION 1..118: note = Description of Artificial Sequence: Synthetic polypeptide

SEQ ID NO: 30319 - DNA, 366 bp, synthetic construct
  misc_feature 1..366: note = Description of Artificial Sequence: Synthetic polynucleotide
  source 1..366: mol_type = other DNA
gaggtgcaactattggagtctgggggaggcttggttcagcctggggggtccctgagactctcctgtgcagcctctggattcacctttagcagctatgccatgaactgggtccgccaggctccagggaaggggctggaatgggtctcaactattagtggtagaggtcttggcacatactacgcagactccgtgaagggccggttcaccatctccagagacaattccaagaacacgctgtatctgcaactgaacagcctgagagccgaggacacggccgtatattactgtgcgaaagaccatgactacggtgactacaatatctactttgactactggggccagggaaccctggtcaccgtctcctca

SEQ ID NO: 30320 - protein, 122 aa, synthetic construct
  REGION 1..122: note = Description of Artificial Sequence: Synthetic polypeptide
EVQLLESGGGLVQPGGSLRLSCAASGFTFSSYAMNWVRQAPGKGLEWVSTISGRGLGTYYADSVKGRFTISRDNSKNTLYLQLNSLRAEDTAVYYCAKDHDYGDYNIYFDYWGQGTLVTVSS

SEQ ID NO: 30321 - DNA, 357 bp, synthetic construct; identical to SEQ ID NO: 30277
  misc_feature 1..357: note = Description of Artificial Sequence: Synthetic polynucleotide
  source 1..357: mol_type = other DNA

SEQ ID NO: 30322 - protein, 119 aa, synthetic construct; identical to SEQ ID NO: 30278
  REGION 1..119: note = Description of Artificial Sequence: Synthetic polypeptide

SEQ ID NO: 30323 - DNA, 354 bp, synthetic construct; identical to SEQ ID NO: 30137
  misc_feature 1..354: note = Description of Artificial Sequence: Synthetic polynucleotide
  source 1..354: mol_type = other DNA

SEQ ID NO: 30324 - protein, 118 aa, synthetic construct; identical to SEQ ID NO: 30138
  REGION 1..118: note = Description of Artificial Sequence: Synthetic polypeptide

SEQ ID NO: 30325 - DNA, 366 bp, synthetic construct; identical to SEQ ID NO: 30133
  misc_feature 1..366: note = Description of Artificial Sequence: Synthetic polynucleotide
  source 1..366: mol_type = other DNA

SEQ ID NO: 30326 - protein, 122 aa, synthetic construct; identical to SEQ ID NO: 30134
  REGION 1..122: note = Description of Artificial Sequence: Synthetic polypeptide

SEQ ID NO: 30327 - DNA, 345 bp, synthetic construct
  misc_feature 1..345: note = Description of Artificial Sequence: Synthetic polynucleotide
  source 1..345: mol_type = other DNA
gaggtgcagctggtggagtctgggggaggcctggtcaagcctggggggtccctgagactctcctgtgcagcctctggattcaccttcagtagctatagaatgaactgggtccgccaggctccagggaaggggctggagtgggtctcatccatgagtaatagtagtagttccatatactacgcagactcagtgaagggccgattcaccatctccagagacaacgccaagaactcactgtatctgcaaatgaacagcctgagagccgaggacacggctgtgtattactgtgcgagacaggcagcccaggactactggggccagggaaccctggtcaccgtctcctca

SEQ ID NO: 30328 - protein, 115 aa, synthetic construct
  REGION 1..115: note = Description of Artificial Sequence: Synthetic polypeptide
EVQLVESGGGLVKPGGSLRLSCAASGFTFSSYRMNWVRQAPGKGLEWVSSMSNSSSSIYYADSVKGRFTISRDNAKNSLYLQMNSLRAEDTAVYYCARQAAQDYWGQGTLVTVSS

SEQ ID NO: 30329 - DNA, 336 bp, synthetic construct
  misc_feature 1..336: note = Description of Artificial Sequence: Synthetic polynucleotide
  source 1..336: mol_type = other DNA
gaggtgcagctgttggagtctgggggagggttggtacagcctggggggtccctgagactctcctgtgcagcctctggattcacctttagcagttatgccatgaggtggatccgccaggctccagggaaggggctgcagtgggtctcagatattagtggtagtggtggtaccacatactacgcagactccgtgaagggccggttcaccatctccagagacaattccaagaacacgctgtatctgcaaatgaacagcctgagagccgaggacacggccgtatattactgtgcgaagacctacctctggggccagggaaccctggtcaccgtctcctca

SEQ ID NO: 30330 - protein, 112 aa, synthetic construct
  REGION 1..112: note = Description of Artificial Sequence: Synthetic polypeptide
EVQLLESGGGLVQPGGSLRLSCAASGFTFSSYAMRWIRQAPGKGLQWVSDISGSGGTTYYADSVKGRFTISRDNSKNTLYLQMNSLRAEDTAVYYCAKTYLWGQGTLVTVSS

SEQ ID NO: 30331 - DNA, 351 bp, synthetic construct
  misc_feature 1..351: note = Description of Artificial Sequence: Synthetic polynucleotide
  source 1..351: mol_type = other DNA
caggtgcagctggtggagtctgggggaggcgtggtccagcctgggaggtccctgagactctcctgtgcagcgtctggattcaccttcagtacctatggcatgcactgggtccgccaggctccaggcaaggggctggagtgggtggctgttatatggtatgatgtaaataataaatactatgcagactccgtgaagggccgattcaccatctccagagacaattccaagaacacgctgtatctgcaaatgaacagcctgagagccgaggacacggctgtgtattactgtgcgagagagctggggttcctctctgactattggggccagggaaccctggtcaccgtctcctca

SEQ ID NO: 30332 - protein, 117 aa, synthetic construct
  REGION 1..117: note = Description of Artificial Sequence: Synthetic polypeptide
QVQLVESGGGVVQPGRSLRLSCAASGFTFSTYGMHWVRQAPGKGLEWVAVIWYDVNNKYYADSVKGRFTISRDNSKNTLYLQMNSLRAEDTAVYYCARELGFLSDYWGQGTLVTVSS

SEQ ID NO: 30333 - DNA, 363 bp, synthetic construct
  misc_feature 1..363: note = Description of Artificial Sequence: Synthetic polynucleotide
  source 1..363: mol_type = other DNA
gaggtgcaactgttggagtctgggggaggcttggtacagcctggggggtccctgagactctcctgtgcagcctctgaattcacctttagcacctatgccatgagctgggtccgccaggctccagggaaggggctggagtgggtctcagttattagtggtagtggtggtagcacatactacgcagactccgtgaagggccggttcaccatctccagagacaattccaagaacacgctgtatctgcaaatgaacagcctgagagccgaggacacggccgtatattactgtgcgaaaaggagcagtggctggtacgaggatgctcttgatatctggggccaagggacaatggtcaccgtctcttca

SEQ ID NO: 30334 - protein, 121 aa, synthetic construct
  REGION 1..121: note = Description of Artificial Sequence: Synthetic polypeptide
EVQLLESGGGLVQPGGSLRLSCAASEFTFSTYAMSWVRQAPGKGLEWVSVISGSGGSTYYADSVKGRFTISRDNSKNTLYLQMNSLRAEDTAVYYCAKRSSGWYEDALDIWGQGTMVTVSS

SEQ ID NO: 30335 - DNA, 345 bp, synthetic construct
  misc_feature 1..345: note = Description of Artificial Sequence: Synthetic polynucleotide
  source 1..345: mol_type = other DNA
gaggtgcagctggtggagtctgggggaggcctggtcaagcctggggggtccctgagactctcctgtgcagcctctggattcaccttcagtagctataccatgaactgggtccgccaggctccagggaaggggctggagtgggtctcatccattagtggtagtagtagttacatatactacgcagactcagtgaagggccgattcaccatctccagagacaacgccaagaactcactgtatctgcaaatgaacagcctgaaagccgaggacacggctgtgtattactgtgcgagagtagctacctttgactactggggccagggaaccctggtcaccgtctcctca

SEQ ID NO: 30336 - protein, 115 aa, synthetic construct
  REGION 1..115: note = Description of Artificial Sequence: Synthetic polypeptide
EVQLVESGGGLVKPGGSLRLSCAASGFTFSSYTMNWVRQAPGKGLEWVSSISGSSSYIYYADSVKGRFTISRDNAKNSLYLQMNSLKAEDTAVYYCARVATFDYWGQGTLVTVSS

SEQ ID NO: 30337 - DNA, 342 bp, synthetic construct
  misc_feature 1..342: note = Description of Artificial Sequence: Synthetic polynucleotide
  source 1..342: mol_type = other DNA
gaggtgcagctggtggagtctgggggaggcctggtcaagcctggggggtccctgagactctcctgtgcagcctctggattcaccttcagtagttatagcatgaactgggtccgccaggctccagggaaggggctggagtgggtctcatccattagtagtagtagtacttacatatactacgcagactcagtgaagggccgattcaccatctccagagacaacgccaagaactcactgtatctgcaaatgaacagcctgagagccgaggacacggctgtgtattactgtgcgagagatagagggtccatctggggccagggaaccctggtcaccgtctcctca

SEQ ID NO: 30338 - protein, 114 aa, synthetic construct
  REGION 1..114: note = Description of Artificial Sequence: Synthetic polypeptide
EVQLVESGGGLVKPGGSLRLSCAASGFTFSSYSMNWVRQAPGKGLEWVSSISSSSTYIYYADSVKGRFTISRDNAKNSLYLQMNSLRAEDTAVYYCARDRGSIWGQGTLVTVSS

SEQ ID NO: 30339 - DNA, 345 bp, synthetic construct
  misc_feature 1..345: note = Description of Artificial Sequence: Synthetic polynucleotide
  source 1..345: mol_type = other DNA
gaggtgcagctgttggagtctgggggaggcttggtacagccgggggggtccctgagactctcctgtgcagcctctggattcacctttagtagctatgtcatgagctgggtccgccaggctccagggaagggactggactgggtctcagctatgagtggtagtggtggtagaacatactacgcagactccgtgaagggccggttcaccatctccagagacaattccaagaacacgctgtatctgcaaatgaacagcctgagagccgaggacacggccgtgtattactgtgcgaagtatacctggaacggctactggggccagggaaccctggtcaccgtctcctca

SEQ ID NO: 30340 - protein, 115 aa, synthetic construct
  REGION 1..115: note = Description of Artificial Sequence: Synthetic polypeptide
EVQLLESGGGLVQPGGSLRLSCAASGFTFSSYVMSWVRQAPGKGLDWVSAMSGSGGRTYYADSVKGRFTISRDNSKNTLYLQMNSLRAEDTAVYYCAKYTWNGYWGQGTLVTVSS

SEQ ID NO: 30341 - DNA, 357 bp, synthetic construct
  misc_feature 1..357: note = Description of Artificial Sequence: Synthetic polynucleotide
  source 1..357: mol_type = other DNA
cagctgcacctgcaggagtcgggcccaggactggtgaagccttcggagaccctgtccctcacctgcactgtctctggtggctccatcagcagtggtagttactactggggctggatccgccagcccccagggaagggactggagtggattgggagtatctactatagtgggagcacctactacaatccgtccctcaagagtcgagtcaccatatccgtagacacgtccaagaaccagttctccctgaacctgagctctgtgaccgccgcagacacggctgtctattactgtgcgagacataaagtggctggtccctttgactactggggccagggaaccctggtcaccgtctcctca

SEQ ID NO: 30342 - protein, 119 aa, synthetic construct
  REGION 1..119: note = Description of Artificial Sequence: Synthetic polypeptide
QLHLQESGPGLVKPSETLSLTCTVSGGSISSGSYYWGWIRQPPGKGLEWIGSIYYSGSTYYNPSLKSRVTISVDTSKNQFSLNLSSVTAADTAVYYCARHKVAGPFDYWGQGTLVTVSS

SEQ ID NO: 30343 - DNA, 342 bp, synthetic construct
  misc_feature 1..342: note = Description of Artificial Sequence: Synthetic polynucleotide
  source 1..342: mol_type = other DNA
gaggtgcaactggtggagtctgggggaggcctggtcaagcctggggggtccctgagattctcctgtgcagcctctggattcaccttcagtagttatagcatgaactgggtccgccaggctccagggaaggggctggagtgggtctcatccattagtggtagtagtacgtacatatactacgcagactcagtgaagggccgattcaccatctccagagacaacgccaagaactcactgtatctgcaaatgaacagcctgagagccgaagacacggctgtgtattactgtgcgagagatcggggcagcagctggggccagggaaccctggtcaccgtctcctca

SEQ ID NO: 30344 - protein, 114 aa, synthetic construct
  REGION 1..114: note = Description of Artificial Sequence: Synthetic polypeptide
EVQLVESGGGLVKPGGSLRFSCAASGFTFSSYSMNWVRQAPGKGLEWVSSISGSSTYIYYADSVKGRFTISRDNAKNSLYLQMNSLRAEDTAVYYCARDRGSSWGQGTLVTVSS

SEQ ID NO: 30345 - DNA, 342 bp, synthetic construct
  misc_feature 1..342: note = Description of Artificial Sequence: Synthetic polynucleotide
  source 1..342: mol_type = other DNA
gaggtgcagctggtggagtctgggggaggcctggtcaagcctggggggtccctgagactctcctgtgcagcctctggattcacattcagtagctatagcatgaactgggtccgccaggctccagggaaggggctagagtgggtctcatgcattagtggtagtagtagttacatatattatgcagactcagtgaagggccgattcaccatgtccagagacaacgccaagaactcactgtatctgcaaatgaacagcctgagagccgaggacacggctgtgtattactgtgtgagagatcgagggggctattggggccagggaaccctggtcaccgtctcctca

SEQ ID NO: 30346 - protein, 114 aa, synthetic construct
  REGION 1..114: note = Description of Artificial Sequence: Synthetic polypeptide
EVQLVESGGGLVKPGGSLRLSCAASGFTFSSYSMNWVRQAPGKGLEWVSCISGSSSYIYYADSVKGRFTMSRDNAKNSLYLQMNSLRAEDTAVYYCVRDRGGYWGQGTLVTVSS

SEQ ID NO: 30347 - DNA, 363 bp, synthetic construct
  misc_feature 1..363: note = Description of Artificial Sequence: Synthetic polynucleotide
  source 1..363: mol_type = other DNA
caggtgcagctggtggagtctgggggaggcgtggtccagcctgggaggtccctgagactctcctgtgcagcgtctggattcaccttcagtaattatggcatgcactgggtccgccaggctccaggcaaggggctggagtgggtggcaattatatggtatgatggaagttataaatactatgcagactccgtgaagggccgattcaccgtctccagagacaattccaagaacacgctgtatctgcaaatgaacagcctgagagccgaggacacggctgtgtattactgtgcgagagagggatacgatttttggagtggtttctttgactcctggggccagggaaccctggtcaccgtctcctca

SEQ ID NO: 30348 - protein, 121 aa, synthetic construct
  REGION 1..121: note = Description of Artificial Sequence: Synthetic polypeptide
QVQLVESGGGVVQPGRSLRLSCAASGFTFSNYGMHWVRQAPGKGLEWVAIIWYDGSYKYYADSVKGRFTVSRDNSKNTLYLQMNSLRAEDTAVYYCAREGYDFWSGFFDSWGQGTLVTVSS

SEQ ID NO: 30349 - DNA, 351 bp, synthetic construct
  misc_feature 1..351: note = Description of Artificial Sequence: Synthetic polynucleotide
  source 1..351: mol_type = other DNA
caggtgcagctggtggagtctgggggaggcgtggtccagcctgggaggtccctgagactctcctgtgcagcgtctggattcaccttcagtagctatggcatgcactgggtccgccaggctccaggcaaggggctggagtgggtggctgttatatggtatgatgtaaataataaatactatgcagactccgtgaagggccgattcaccatctccagagacaattccaagaacacgctgtatctgcaaatgaacagcctgagagccgaggacacggctgtgtattactgtgcgagagagctggggttcctctctgactactggggccagggaaccctggtcaccgtctcctca

SEQ ID NO: 30350 - protein, 117 aa, synthetic construct
  REGION 1..117: note = Description of Artificial Sequence: Synthetic polypeptide
QVQLVESGGGVVQPGRSLRLSCAASGFTFSSYGMHWVRQAPGKGLEWVAVIWYDVNNKYYADSVKGRFTISRDNSKNTLYLQMNSLRAEDTAVYYCARELGFLSDYWGQGTLVTVSS

SEQ ID NO: 30351 - DNA, 345 bp, synthetic construct
  misc_feature 1..345: note = Description of Artificial Sequence: Synthetic polynucleotide
  source 1..345: mol_type = other DNA
gaggtgcagctggtggagtctgggggaggcctggtcaagcctggggggtccctgagactctcctgtgcagcctctggattcaccttcagtagctataccatgaactgggtccgccaggctccagggaaggggctggagtgggtctcatccattagtggtagcagtagttacataaactacgcagactcagtgaagggccgattcaccatctccagagacaacgccaagaactcactgtatctgcaaatgaacagcctgagagccgaggacacggctgtgtattactgtgcgagagtggctcactttgactactggggccagggaaccctggtcaccgtctcctca

SEQ ID NO: 30352 - protein, 115 aa, synthetic construct
  REGION 1..115: note = Description of Artificial Sequence: Synthetic polypeptide
EVQLVESGGGLVKPGGSLRLSCAASGFTFSSYTMNWVRQAPGKGLEWVSSISGSSSYINYADSVKGRFTISRDNAKNSLYLQMNSLRAEDTAVYYCARVAHFDYWGQGTLVTVSS

SEQ ID NO: 30353 - DNA, 342 bp, synthetic construct
  misc_feature 1..342: note = Description of Artificial Sequence: Synthetic polynucleotide
  source 1..342: mol_type = other DNA
gaggtgcagtgggtggagtctgggggaggcctggtcaagcctggggggtccctgagactctcctgtgcagcctctggattcaccttcagtagctatagcatgaactgggtccgccaggctccagggaaggggctggagtgggtctcatccattagtggtagtggtagttacataaactacgcagactcagtgaagggccggttcaccatctccagagacaacgccaagacctcactgtatctgcaagtgaacggcctgagagccgaggacacggctgtgtattactgtgcgagatccaagtttgactcctggggccagggaaccctggtcaccgtctcctca

SEQ ID NO: 30354 - protein, 114 aa, synthetic construct
  REGION 1..114: note = Description of Artificial Sequence: Synthetic polypeptide
EVQWVESGGGLVKPGGSLRLSCAASGFTFSSYSMNWVRQAPGKGLEWVSSISGSGSYINYADSVKGRFTISRDNAKTSLYLQVNGLRAEDTAVYYCARSKFDSWGQGTLVTVSS

SEQ ID NO: 30355 - DNA, 342 bp, synthetic construct
  misc_feature 1..342: note = Description of Artificial Sequence: Synthetic polynucleotide
  source 1..342: mol_type = other DNA
gaggtgcagctggtggaatctgggggaggcctggtcaagcctggggggtccctgagactctcctgtgcagcctctggattcaccttcagtagttatggcatgaactgggtccgccaggctccagggaaggggctggagtggatctcatccattagtggtagtggtagttacatatactacgcagactcagtgaagggccgattcaccatttccagagacaacgccaagaactcactgtatctgcaaatgaacagcctgagagccgaggacacggctgtgtattactgtgcgattagcagtggctggtcttggggccagggaaccctggtcaccgtctcctca

SEQ ID NO: 30356 - protein, 114 aa, synthetic construct
  REGION 1..114: note = Description of Artificial Sequence: Synthetic polypeptide
EVQLVESGGGLVKPGGSLRLSCAASGFTFSSYGMNWVRQAPGKGLEWISSISGSGSYIYYADSVKGRFTISRDNAKNSLYLQMNSLRAEDTAVYYCAISSGWSWGQGTLVTVSS

SEQ ID NO: 30357 - DNA, 369 bp, synthetic construct
  misc_feature 1..369: note = Description of Artificial Sequence: Synthetic polynucleotide
  source 1..369: mol_type = other DNA
caggtgcagctggtggagtctgggggaggcgtggtccagcctgggaggtccctgagactctcctgtgcagcgtctggattcaccttcagtgactatgtcatgcactgggtccgccaggctccaggcaaggggctggagtgggtgtcagttatatggtatgatggaagtaataaatactatgcagactccgtgaagggccgattcaccatctccagagacaattccaagaacacactgtatctgcaaatgaacagcctgagagccgaggacacggctgtgtattactgtgcgagagaaccgtatactagtggctggtacgactacggtatggacgtctggggccaagggaccacggtcaccgtctcctca

SEQ ID NO: 30358 - protein, 123 aa, synthetic construct
  REGION 1..123: note = Description of Artificial Sequence: Synthetic polypeptide
QVQLVESGGGVVQPGRSLRLSCAASGFTFSDYVMHWVRQAPGKGLEWVSVIWYDGSNKYYADSVKGRFTISRDNSKNTLYLQMNSLRAEDTAVYYCAREPYTSGWYDYGMDVWGQGTTVTVSS

SEQ ID NO: 30359 - DNA, 348 bp, synthetic construct
  misc_feature 1..348: note = Description of Artificial Sequence: Synthetic polynucleotide
  source 1..348: mol_type = other DNA
caggtgcagctgcaggagtcgggcccaggactggtgaagccttcggagaccctgtccctcacctgcactgtctctggtggctccatcagtagtcacttctggagctggatccggcagcccgccgggaagggactggagtggattggccgtatctataccagtgggaccaccaactacaccccctccctcaagagtcgagtcaccatgtcagtagacacgtccaagaaccagttctccctgaagctgagctctgtgaccgccgcggacacggccgtgtattactgtgcgagattgagcagtggctggtttgactactggggccagggaaccctggtcaccgtctcctca

SEQ ID NO: 30360 - protein, 116 aa, synthetic construct
  REGION 1..116: note = Description of Artificial Sequence: Synthetic polypeptide
QVQLQESGPGLVKPSETLSLTCTVSGGSISSHFWSWIRQPAGKGLEWIGRIYTSGTTNYTPSLKSRVTMSVDTSKNQFSLKLSSVTAADTAVYYCARLSSGWFDYWGQGTLVTVSS

SEQ ID NO: 30361 - DNA, 342 bp, synthetic construct; identical to SEQ ID NO: 30343
  misc_feature 1..342: note = Description of Artificial Sequence: Synthetic polynucleotide
  source 1..342: mol_type = other DNA

SEQ ID NO: 30362 - protein, 114 aa, synthetic construct; identical to SEQ ID NO: 30344
  REGION 1..114: note = Description of Artificial Sequence: Synthetic polypeptide

SEQ ID NO: 30363 - DNA, 342 bp, synthetic construct
  misc_feature 1..342: note = Description of Artificial Sequence: Synthetic polynucleotide
  source 1..342: mol_type = other DNA
gaggtgcaactggtggagtctgggggaggcctggtcaagcctggggggtccctgagactctcctgtgcagcctctgggttcaccttcagtagctatagcatgaactgggtccgccaggctccagggaaggggctggagtgggtctcatccatcagtggtagtagtacttacatatactacgcagactcagtgaagggccgattcaccatctccagagacaacgccaagaactcactgcatctgcaaatgaacagcctgagagccgaggacacggctgtgtattactgtgcgagagatcggggcagcagctggggccagggaaccctggtcaccgtctcctca

SEQ ID NO: 30364 - protein, 114 aa, synthetic construct
  REGION 1..114: note = Description of Artificial Sequence: Synthetic polypeptide
EVQLVESGGGLVKPGGSLRLSCAASGFTFSSYSMNWVRQAPGKGLEWVSSISGSSTYIYYADSVKGRFTISRDNAKNSLHLQMNSLRAEDTAVYYCARDRGSSWGQGTLVTVSS

SEQ ID NO: 30365 - DNA, 351 bp, synthetic construct
  misc_feature 1..351: note = Description of Artificial Sequence: Synthetic polynucleotide
  source 1..351: mol_type = other DNA
caggtgcagctggtggagtctgggggaggcgtggtccagcctgggaggtccctgagactctcctgtgcagtgtctggattcaccttcagtagctatggcatgcactgggtccgccaggctccaggcaaggggctggagtgggtggcagttatatggtatgatgtaactaataaatactatgcagactccgtgaagggccgattcaccatctccagagacaattccaagaacacgctgtatctgcaaatgaacagcctgagagacgaggacacggctgtgtattattgtgtgagagaactgggatgggcggaggactactggggccagggaaccctggtcaccgtctcctca

SEQ ID NO: 30366 - protein, 117 aa, synthetic construct
  REGION 1..117: note = Description of Artificial Sequence: Synthetic polypeptide
QVQLVESGGGVVQPGRSLRLSCAVSGFTFSSYGMHWVRQAPGKGLEWVAVIWYDVTNKYYADSVKGRFTISRDNSKNTLYLQMNSLRDEDTAVYYCVRELGWAEDYWGQGTLVTVSS

SEQ ID NO: 30367 - DNA, 342 bp, synthetic construct
  misc_feature 1..342: note = Description of Artificial Sequence: Synthetic polynucleotide
  source 1..342: mol_type = other DNA
gaggtgcagctggtggagtctgggggaggcctggtcacgcctggggggtccctgagactctcctgtgcagcctctggattcaccttcagtagctataccatgaactgggtccgccaggctccagggaaggggctggagtgggtctcattgattagtggcagtagtagttacatatactacgcagactcagtgaagggccgattcaccatctccagagacaacgccaagaactcactgtatctgcaaatgaacagcctgagagccgaggacacggctgtgtattactgtgcgagagatcgaggcagcctctggggccagggaaccctggtcaccgtctcctca

SEQ ID NO: 30368 - protein, 114 aa, synthetic construct
  REGION 1..114: note = Description of Artificial Sequence: Synthetic polypeptide
EVQLVESGGGLVTPGGSLRLSCAASGFTFSSYTMNWVRQAPGKGLEWVSLISGSSSYIYYADSVKGRFTISRDNAKNSLYLQMNSLRAEDTAVYYCARDRGSLWGQGTLVTVSS

SEQ ID NO: 30369 - DNA, 354 bp, synthetic construct
  misc_feature 1..354: note = Description of Artificial Sequence: Synthetic polynucleotide
  source 1..354: mol_type = other DNA
caggtgcagctggtgcagtctggggctgaggtgaggaagcctggggcctcagtgaaggtctcctgcaaggcttctggatacaccttcaccaattatgatatcaactgggtgcgacaggccactggacaagggcttgagtggatgggatggatgcaccctaacagtggtaacacaggctatgcacagaagttccagggcagattcaccatgaccaggaacacctccataagcacagcctacatggagctgagcagcctgagatctgaggacacggccgtgtattactgtgcctatagcagtggctggtaccgctttgactactggggccagggaaccctggtcaccgtctcctca

SEQ ID NO: 30370 - protein, 118 aa, synthetic construct
  REGION 1..118: note = Description of Artificial Sequence: Synthetic polypeptide
QVQLVQSGAEVRKPGASVKVSCKASGYTFTNYDINWVRQATGQGLEWMGWMHPNSGNTGYAQKFQGRFTMTRNTSISTAYMELSSLRSEDTAVYYCAYSSGWYRFDYWGQGTLVTVSS

SEQ ID NO: 30371 - DNA, 345 bp, synthetic construct
  misc_feature 1..345: note = Description of Artificial Sequence: Synthetic polynucleotide
  source 1..345: mol_type = other DNA
gaggtgcagctggtggagtctgggggaggcttggtacagcctggggggtccctgagactctcctgtgcagcctctggattcacctttagcagctatgtcatgagctgggtccgccaggctccagggaaggggctggagtgggtctcagctattagtggtagtggtggtaggacagactacgcagactccgtaaagggccggttcaccatctccagagacaattccaagaacacgctgtatctgcaaatgaacagcctgagagccgaggacacggccgtatattactgtgcgaaagggggctggaaccacgactggggccaagggaccacggtcaccgtctcctca

SEQ ID NO: 30372 - protein, 115 aa, synthetic construct
  REGION 1..115: note = Description of Artificial Sequence: Synthetic polypeptide
EVQLVESGGGLVQPGGSLRLSCAASGFTFSSYVMSWVRQAPGKGLEWVSAISGSGGRTDYADSVKGRFTISRDNSKNTLYLQMNSLRAEDTAVYYCAKGGWNHDWGQGTTVTVSS

SEQ ID NO: 30373 - DNA, 339 bp, synthetic construct
  misc_feature 1..339: note = Description of Artificial Sequence: Synthetic polynucleotide
  source 1..339: mol_type = other DNA
gaggtgcagctggtggagtctgggggaggcctggtcaagccgggggggtccctgagactctcctgtgcagcctctggattcaccttcagtagctatagaatgaactgggtccgccaggctccagggaaggggctggagtgggtctcatccataagtggtagtggtaattacatagactacgcagactcagtgaagggccgattcaccatctccagagacaacgccaagaactcactgtatctgcaaatgaacagcctgagagccgaggacacggctgtgtattactgtgcgagaggttgggacgtctggggccaagggaccacggtcaccgtctcctca

SEQ ID NO: 30374 - protein, 113 aa, synthetic construct
  REGION 1..113: note = Description of Artificial Sequence: Synthetic polypeptide
EVQLVESGGGLVKPGGSLRLSCAASGFTFSSYRMNWVRQAPGKGLEWVSSISGSGNYIDYADSVKGRFTISRDNAKNSLYLQMNSLRAEDTAVYYCARGWDVWGQGTTVTVSS

SEQ ID NO: 30375 - DNA, 345 bp, synthetic construct
  misc_feature 1..345: note = Description of Artificial Sequence: Synthetic polynucleotide
  source 1..345: mol_type = other DNA
caggtgcagctggtgcagtctggggctgaggtgaagaagcctggggcctcagtgaaggtctcctgcaaggcttctggatacaccttcaccagttatgatatcaactgggtgcgacaggccactggacaagggcttgagtggatgggatggatgaaccctaacagtggtaacacaggctatgtacagaagttccagggcagagtcaccatgaccaggaacacctccataagcacagcctacatggagctgagcagcctgagatctgaggacacggccgtgtattactgtgcgagaaagaaaactggggactactggggccagggaaccctggtcaccgtctcctca

SEQ ID NO: 30376 - protein, 115 aa, synthetic construct
  REGION 1..115: note = Description of Artificial Sequence: Synthetic polypeptide
QVQLVQSGAEVKKPGASVKVSCKASGYTFTSYDINWVRQATGQGLEWMGWMNPNSGNTGYVQKFQGRVTMTRNTSISTAYMELSSLRSEDTAVYYCARKKTGDYWGQGTLVTVSS

SEQ ID NO: 30377 - DNA, 363 bp, synthetic construct
  misc_feature 1..363: note = Description of Artificial Sequence: Synthetic polynucleotide
  source 1..363: mol_type = other DNA
caggtgcagctggtggagtctgggggaggcgtggtccagcctgggaggtccctgagactctcctgtgcagcctctggattcaccttcagtaactatggcatgcactgggtccgccaggctccaggcaaggggctggagtgggtggcagttatatcatattctggaaacaataaatactatgcagactccgtgaagggccgattcaccatctccagagacaattccaagaacacgctgtatctgcagttgaacagcctgagagctgaggacatggctgtgtattactgtgcgagacggagcagctcgtgggggggctacggtatggacgtctggggccacgggaccacggtcaccgtctcctca

SEQ ID NO: 30378 - protein, 121 aa, synthetic construct
  REGION 1..121: note = Description of Artificial Sequence: Synthetic polypeptide
QVQLVESGGGVVQPGRSLRLSCAASGFTFSNYGMHWVRQAPGKGLEWVAVISYSGNNKYYADSVKGRFTISRDNSKNTLYLQLNSLRAEDMAVYYCARRSSSWGGYGMDVWGHGTTVTVSS

SEQ ID NO: 30379 - DNA, 351 bp, synthetic construct
  misc_feature 1..351: note = Description of Artificial Sequence: Synthetic polynucleotide
  source 1..351: mol_type = other DNA
caggtgcagctggtggagtctgggggaggcgtggtccagcctgggaggtccctgagactctcctgtgcagcgtctggattcaccttcagtagctatggcatacactgggtccgccaggctccaggcaaggggctggagtgggtggctgttgtatggtatgatgtaaataataaatactatgcagactccgtgaagggccgattcaccatctccagagacaattccaagaacacgctgtatctgcaaatgaacagcctgagagccgaggacacggctgtgtattactgtgcgagagagctggggttcctctctgactactggggccagggaaccctggtcaccgtctcctca

SEQ ID NO: 30380 - protein, 117 aa, synthetic construct
  REGION 1..117: note = Description of Artificial Sequence: Synthetic polypeptide
QVQLVESGGGVVQPGRSLRLSCAASGFTFSSYGIHWVRQAPGKGLEWVAVVWYDVNNKYYADSVKGRFTISRDNSKNTLYLQMNSLRAEDTAVYYCARELGFLSDYWGQGTLVTVSS

SEQ ID NO: 30381 - DNA, 369 bp, synthetic construct
  misc_feature 1..369: note = Description of Artificial Sequence: Synthetic polynucleotide
  source 1..369: mol_type = other DNA
caggtgcaactggtggagtctgggggaggcgtggtccagcctgggaggtccctgagactctcctgtgcagcgtctggattcacctttagtgactatgtcatgcagtgggtccgccaggctccaggcaaggggctggagtgggtggcagttatatggtatgatggaagtaataaatactatgcagactccgtgaagggccgattcaccatctccagagacaattccaagaacacgctgtatctgcaaatgaacagcctgagagccgaggacacggctgtgtattactgtgcgagagaaccgtataatagtggctggtacgactacggtatggacgtctggggccaagggaccacggtcaccgtctcctca

SEQ ID NO: 30382 - protein, 123 aa, synthetic construct
  REGION 1..123: note = Description of Artificial Sequence: Synthetic polypeptide
QVQLVESGGGVVQPGRSLRLSCAASGFTFSDYVMQWVRQAPGKGLEWVAVIWYDGSNKYYADSVKGRFTISRDNSKNTLYLQMNSLRAEDTAVYYCAREPYNSGWYDYGMDVWGQGTTVTVSS

SEQ ID NO: 30383 - DNA, 369 bp, synthetic construct
  misc_feature 1..369: note = Description of Artificial Sequence: Synthetic polynucleotide
  source 1..369: mol_type = other DNA
caggtgcagctggtggagtctgggggaggcgtggtccagcctgggaggtccctgagactctcctgcgcagcgtctggattcaccttcagtaactatgtcatgcactgtgtccgccaggctccaggcaaggggctggagtgggtggcagttatatggtatgatggaagtaataaatactatgcagactccgtgaagggccgattcaccatctccagagacaattccaagaacacgctgtatctgcaaatgaacagcctgagagccgaggacacggctgtgtattactgtgcgagagaaccgtatagtagtggctggtacgactacggtatggacgtctggggccaagggaccacggtcaccgtctcctca

SEQ ID NO: 30384 - protein, 123 aa, synthetic construct
  REGION 1..123: note = Description of Artificial Sequence: Synthetic polypeptide
QVQLVESGGGVVQPGRSLRLSCAASGFTFSNYVMHCVRQAPGKGLEWVAVIWYDGSNKYYADSVKGRFTISRDNSKNTLYLQMNSLRAEDTAVYYCAREPYSSGWYDYGMDVWGQGTTVTVSS

SEQ ID NO: 30385 - DNA, 345 bp, synthetic construct
  misc_feature 1..345: note = Description of Artificial Sequence: Synthetic polynucleotide
  source 1..345: mol_type = other DNA
gaggtgcagctggtggagtctgggggaggcctggtcaagcctggggggtccctaagactctcctgtgcagcctctggattcaccttcagtagctataccatgaactgggtccgccaggctccagggaaggggctggagtgggtctcatccattagtggtagtagtagttacatatactacgcagactcagtgaagggccgattcaccatctccagagacaacgccaagaactcactgtatctgcaaatgaacagcctgagagccgaggacacggctgtatattactgtgcgcgagtgagctgggctgactgctggggccagggaaccctggtcaccgtctcctca

SEQ ID NO: 30386 - protein, 115 aa, synthetic construct
  REGION 1..115: note = Description of Artificial Sequence: Synthetic polypeptide
EVQLVESGGGLVKPGGSLRLSCAASGFTFSSYTMNWVRQAPGKGLEWVSSISGSSSYIYYADSVKGRFTISRDNAKNSLYLQMNSLRAEDTAVYYCARVSWADCWGQGTLVTVSS

SEQ ID NO: 30387 - DNA, 363 bp, synthetic construct
  misc_feature 1..363: note = Description of Artificial Sequence: Synthetic polynucleotide
  source 1..363: mol_type = other DNA
caggtgcagctggtggagtctgggggaggcgtggtccagcctgggaggtccctgagactctcctgtgcagcgtctggattcaccttcagtagctatggcatgcactgggtccgccaggctccaggcaaggggctggagtgggtggcagttatatggtatgatggaagttataaatactatgcagactccgtgaagggccgattcaccatctccagagacaattccaagaacacgctgtatcttcaaatgaacagcctgagagccgaggacacggctgtgtattactgtgcgagagaggcctacgatttttggagtggttattatgactactggggccagggaaccctggtcaccgtctcctca

SEQ ID NO: 30388 - protein, 121 aa, synthetic construct
  REGION 1..121: note = Description of Artificial Sequence: Synthetic polypeptide
QVQLVESGGGVVQPGRSLRLSCAASGFTFSSYGMHWVRQAPGKGLEWVAVIWYDGSYKYYADSVKGRFTISRDNSKNTLYLQMNSLRAEDTAVYYCAREAYDFWSGYYDYWGQGTLVTVSS

SEQ ID NO: 30389 - DNA, 339 bp, synthetic construct
  misc_feature 1..339: note = Description of Artificial Sequence: Synthetic polynucleotide
  source 1..339: mol_type = other DNA
gaggtgcagctgttggagtctgggggaggcttggtacagcctggggggtccctgagactctcctgtgcagcctctggattcacctttagcagctatgtcatgagctgggtccgccaggctccagggaaggggctggagtgggtctcagctatgagtggtagtggtggtcacacatactacgcagactccgtgaagggccggttcaccatctccagagacaattccaagaacacggtgtatctgcaaatgaacagcctgagagccgaggacacggccgtatattactgtgtgaaacatggatacagctggggccagggaaccctggtcaccgtctcctca

SEQ ID NO: 30390 - protein, 113 aa, synthetic construct
  REGION 1..113: note = Description of Artificial Sequence: Synthetic polypeptide
EVQLLESGGGLVQPGGSLRLSCAASGFTFSSYVMSWVRQAPGKGLEWVSAMSGSGGHTYYADSVKGRFTISRDNSKNTVYLQMNSLRAEDTAVYYCVKHGYSWGQGTLVTVSS

SEQ ID NO: 30391 - DNA, 339 bp, synthetic construct
  misc_feature 1..339: note = Description of Artificial Sequence: Synthetic polynucleotide
  source 1..339: mol_type = other DNA
gaggtgcagctggtggagtctgggggaggcctggtcaagcctggggggtccctgagactctcctgtgcagcctctggattcaccttcagtagctatcgcatgaactgggtccgccaggctccagggaaggggctggagtgggtctcatccattagtagtagtactggttacatgtactacgcagactcagtgaagggccgattcaccatctccagagacaacgccaagaactcactgtatctgcaaatgaacagcctgagagccgaggacacggctgtgtatttctgtgcgagagataaagattactggggccagggaaccctggtcaccgtctcctca

SEQ ID NO: 30392 - protein, 113 aa, synthetic construct
  REGION 1..113: note = Description of Artificial Sequence: Synthetic polypeptide
EVQLVESGGGLVKPGGSLRLSCAASGFTFSSYRMNWVRQAPGKGLEWVSSISSSTGYMYYADSVKGRFTISRDNAKNSLYLQMNSLRAEDTAVYFCARDKDYWGQGTLVTVSS

SEQ ID NO: 30393 - DNA, 342 bp, synthetic construct; identical to SEQ ID NO: 30355
  misc_feature 1..342: note = Description of Artificial Sequence: Synthetic polynucleotide
  source 1..342: mol_type = other DNA

SEQ ID NO: 30394 - protein, 114 aa, synthetic construct; identical to SEQ ID NO: 30356
  REGION 1..114: note = Description of Artificial Sequence: Synthetic polypeptide

SEQ ID NO: 30395 - DNA, 339 bp, synthetic construct
  misc_feature 1..339: note = Description of Artificial Sequence: Synthetic polynucleotide
  source 1..339: mol_type = other DNA
gaggtgcagctgttggagtctgggggaggcttggtacagcctggggggtccctgagactctcctgtgcagcctctggattcacctttagcagctatgtcatgagctgggtccgccagactccagggaagggactggagtgggtctcagctatgagtggtagtggtggtcacacatactacgcagactccgtgaagggccggttcaccatctccagagacaattccaagaacacgctgtatctgcaaatgaacagcctgagagccgaggacacggccatatattactgtgtgaaacatggatacagctggggccagggaaccctggtcaccgtctcctca

SEQ ID NO: 30396 - protein, 113 aa, synthetic construct
  REGION 1..113: note = Description of Artificial Sequence: Synthetic polypeptide
EVQLLESGGGLVQPGGSLRLSCAASGFTFSSYVMSWVRQTPGKGLEWVSAMSGSGGHTYYADSVKGRFTISRDNSKNTLYLQMNSLRAEDTAIYYCVKHGYSWGQGTLVTVSS

SEQ ID NO: 30397 - DNA, 357 bp, synthetic construct
  misc_feature 1..357: note = Description of Artificial Sequence: Synthetic polynucleotide
  source 1..357: mol_type = other DNA
cagctgcagctgcaggagtcgggcccaggactggtgaagccttcggagaccctgtccctcacctgcaccgtctctggtggctccatcagcagaagtagttactactggggctggatccgccagcccccagggaagggactggagtggattgggagtatctattatagtgggagtacctcctacaacccgtctctcgagagtcgagttaccatatccgtagacacgtccaagaaccagttctccctgaagctgagctctgtgaccgccgccgacacggctgtgttttactgtgcgagactctctcaacggtgggactttgactactggggccagggaaccctggtcaccgtctcctca

SEQ ID NO: 30398 - protein, 119 aa, synthetic construct
  REGION 1..119: note = Description of Artificial Sequence: Synthetic polypeptide
QLQLQESGPGLVKPSETLSLTCTVSGGSISRSSYYWGWIRQPPGKGLEWIGSIYYSGSTSYNPSLESRVTISVDTSKNQFSLKLSSVTAADTAVFYCARLSQRWDFDYWGQGTLVTVSS

SEQ ID NO: 30399 - DNA, 354 bp, synthetic construct
  misc_feature 1..354: note = Description of Artificial Sequence: Synthetic polynucleotide
  source 1..354: mol_type = other DNA
caggtgcagctggtgcagtctgggactgaggtgaagaagcctggggcctcagtgaaggtctcctgcaaggcttctggatacaccttcaccaattatgatatcaactgggtgcgacaggccactggacaaggacctgagtggatgggatggatgcaccctaacagtggtaacacaggctatccacagaagttccagggcagagtcaccatgaccaggaacacctccataagcacagcctacatggagctgagcagcctgagatctgaggacacggccgtgtattactgtgcgtatagcagcggctggtacatttttgactactggggccagggaaccctggtcaccgtctcctca

SEQ ID NO: 30400 - protein, 118 aa, synthetic construct
  REGION 1..118: note = Description of Artificial Sequence: Synthetic polypeptide
QVQLVQSGTEVKKPGASVKVSCKASGYTFTNYDINWVRQATGQGPEWMGWMHPNSGNTGYPQKFQGRVTMTRNTSISTAYMELSSLRSEDTAVYYCAYSSGWYIFDYWGQGTLVTVSS

SEQ ID NO: 30401 - DNA, 369 bp, synthetic construct; identical to SEQ ID NO: 30381
  misc_feature 1..369: note = Description of Artificial Sequence: Synthetic polynucleotide
  source 1..369: mol_type = other DNA

SEQ ID NO: 30402 - protein, 123 aa, synthetic construct; identical to SEQ ID NO: 30382
  REGION 1..123: note = Description of Artificial Sequence: Synthetic polypeptide

SEQ ID NO: 30403 - DNA, 342 bp, synthetic construct; identical to SEQ ID NO: 30343
  misc_feature 1..342: note = Description of Artificial Sequence: Synthetic polynucleotide
  source 1..342: mol_type = other DNA

SEQ ID NO: 30404 - protein, 114 aa, synthetic construct; identical to SEQ ID NO: 30344
  REGION 1..114: note = Description of Artificial Sequence: Synthetic polypeptide

SEQ ID NO: 30405 - DNA, 345 bp, synthetic construct
  misc_feature 1..345: note = Description of Artificial Sequence: Synthetic polynucleotide
  source 1..345: mol_type = other DNA
gaggtgcagctggtggagtctgggggaggcctggtcaagtctggggggtccctgagactctcctgtgcagcctctggattcaccttcagtagctataggatgaactgggtccgccaggctccagggaaggggctggagtgggtctcatccattagtggtagtagtagttacatagactacgcagactcagtgaagggccgattcaccatctccagagacaacgccaagaactcactgtatctgcaaatgaacagcctgagagccgaggacacggctgtgtattactgtgcgagaaagagttggtttgactactggggccagggaaccctggtcaccgtctcctca

SEQ ID NO: 30406 - protein, 115 aa, synthetic construct
  REGION 1..115: note = Description of Artificial Sequence: Synthetic polypeptide
EVQLVESGGGLVKSGGSLRLSCAASGFTFSSYRMNWVRQAPGKGLEWVSSISGSSSYIDYADSVKGRFTISRDNAKNSLYLQMNSLRAEDTAVYYCARKSWFDYWGQGTLVTVSS

SEQ ID NO: 30407 - DNA, 357 bp, synthetic construct
  misc_feature 1..357: note = Description of Artificial Sequence: Synthetic polynucleotide
  source 1..357: mol_type = other DNA
cagctgcagctgcaggagtcgggcccaggactggtgaagccttcggagaccctgtccctcacctgcactgtctctggtggctccatcagtagaagtagctactactggggctggatccgccagtacccagggaaggggctggagtggattgggaatatctattatagtgggagcgcctaccacattccgtccctcaagagtcgagtcaccatatccgtagacacgtccaagaaccagttctccctgaagttgaactctgtgaccgccgcagacacggctgtgtattactgtgtgagacatgacccaaactggggagttgactactggggccagggaaccctggtcaccgtctcctca

SEQ ID NO: 30408 - protein, 119 aa, synthetic construct
  REGION 1..119: note = Description of Artificial Sequence: Synthetic polypeptide
QLQLQESGPGLVKPSETLSLTCTVSGGSISRSSYYWGWIRQYPGKGLEWIGNIYYSGSAYHIPSLKSRVTISVDTSKNQFSLKLNSVTAADTAVYYCVRHDPNWGVDYWGQGTLVTVSS

SEQ ID NO: 30409 - DNA, 372 bp, synthetic construct
  misc_feature 1..372: note = Description of Artificial Sequence: Synthetic polynucleotide
  source 1..372: mol_type = other DNA
caggtgcagctggtggagtctgggggaggcgtggtccagcctgggaggtccctgagactctcctgtgcagcgtctggattcaccttcagtagctttggcatgcactgggtccgccaggctccaggcaagggcctggagtgggtggcagtcatatggtatgatggaagttataaatactatgcagactccgtgaagggccgattcaccatctccagagacaattccaagaacacgctgtatctgcaaatgaacagcctgagagccgaggacacggctgtgtattactgtgcgagagttggtatagaagtggctggtgactactacttcggtatggaagtctggggccaagggaccacggtcaccgtctcctca

SEQ ID NO: 30410 - protein, 124 aa, synthetic construct
  REGION 1..124: note = Description of Artificial Sequence: Synthetic polypeptide
QVQLVESGGGVVQPGRSLRLSCAASGFTFSSFGMHWVRQAPGKGLEWVAVIWYDGSYKYYADSVKGRFTISRDNSKNTLYLQMNSLRAEDTAVYYCARVGIEVAGDYYFGMEVWGQGTTVTVSS

SEQ ID NO: 30411 - DNA, 354 bp, synthetic construct
  misc_feature 1..354: note = Description of Artificial Sequence: Synthetic polynucleotide
  source 1..354: mol_type = other DNA
gaggtgcagctggtggagtctggaggaggcttgatccagcctggggggtccctgagactctcctgtgcagcctctgggttcaccgtcagtagcaactacatgagctgggtccgccaggctccagggaaggggctggagtgggtctcagttatttataccggtggtagcacatacaacgcagactccgtgaagggccgattcaccatctccagagacaattccaagaacacgctgtatcttcaaatgaacagcctgagagccgaggacacggccgtgtattactgtgcgagaaattggggaatggctggcccctttgactactggggccagggaaccctggtcaccgtctcctca

SEQ ID NO: 30412 - protein, 118 aa, synthetic construct
  REGION 1..118: note = Description of Artificial Sequence: Synthetic polypeptide
EVQLVESGGGLIQPGGSLRLSCAASGFTVSSNYMSWVRQAPGKGLEWVSVIYTGGSTYNADSVKGRFTISRDNSKNTLYLQMNSLRAEDTAVYYCARNWGMAGPFDYWGQGTLVTVSS

SEQ ID NO: 30413 - DNA, 363 bp, synthetic construct
  misc_feature 1..363: note = Description of Artificial Sequence: Synthetic polynucleotide
  source 1..363: mol_type = other DNA
caggtgcagctggtggagtctgggggaggcgtggtccagcctgggaggtccctgagactctcctgtgcagcgtctggattcaccttcagtagctatggcatgcactgggtccgccaggctccaggcaaggggctggagtgggtggcagttatatcatatggtggaagtaataaataccatgcagactccgtgaagggccgattcaccatctccagagacaattccaagaacacgctgtatctgcaaatgaacagcctgagagctgaggacacggctgtgtattactgtgtgagacggagcagctcgtcggggggctacggtatggacgtctggggccaagggaccacggtcaccgtctcctca

SEQ ID NO: 30414 - protein, 121 aa, synthetic construct
  REGION 1..121: note = Description of Artificial Sequence: Synthetic polypeptide
QVQLVESGGGVVQPGRSLRLSCAASGFTFSSYGMHWVRQAPGKGLEWVAVISYGGSNKYHADSVKGRFTISRDNSKNTLYLQMNSLRAEDTAVYYCVRRSSSSGGYGMDVWGQGTTVTVSS

SEQ ID NO: 30415 - DNA, 351 bp, synthetic construct
  misc_feature 1..351: note = Description of Artificial Sequence: Synthetic polynucleotide
  source 1..351: mol_type = other DNA
caggtgcagctggtggagtctgggggaggcgtggtccagcctgggaggtccctgagactctcctgtgcagcgtctggattcaccttcagtgactttggcttgcactgggtccgccaggctccaggccagggactggagtgggtggcagttatatggtttgatggaagtaataaatactatgcagactccgtgaagggccgattcaccattttcagagacaattccaagaacacgctgtatctgcaaatgaacagcctgagagccgaggacacggctgtgtattactgtgcgagagagattggctggctctctgactactggggccagggaaccctggtcaccgtctcctca

SEQ ID NO: 30416 - protein, 117 aa, synthetic construct
  REGION 1..117: note = Description of Artificial Sequence: Synthetic polypeptide
QVQLVESGGGVVQPGRSLRLSCAASGFTFSDFGLHWVRQAPGQGLEWVAVIWFDGSNKYYADSVKGRFTIFRDNSKNTLYLQMNSLRAEDTAVYYCAREIGWLSDYWGQGTLVTVSS

SEQ ID NO: 30417 - DNA, 363 bp, synthetic construct
  misc_feature 1..363: note = Description of Artificial Sequence: Synthetic polynucleotide
  source 1..363: mol_type = other DNA
caggtgcagctggtggagtctgggggaggcgtggtccagcctgggaggtccctgagactctcctgtgcagcctctggattcaccttcagtagctatggcatgcactgggtccgccaggctccaggcaaggggctggaatgggtggcaattatatcatattctggaagaaatgatttctatgcagactccgtgaagggccgattcaccatctccagagacaattccaagaacacgctgtatctgcaaatgaacagcctgagagctgaggacacggctgtgtattactgtgcgagacgtatagcagcagctggtcactacggtatggacgtctggggccaagggaccacggtcaccgtctcctca

SEQ ID NO: 30418 - protein, 121 aa, synthetic construct
  REGION 1..121: note = Description of Artificial Sequence: Synthetic polypeptide
QVQLVESGGGVVQPGRSLRLSCAASGFTFSSYGMHWVRQAPGKGLEWVAIISYSGRNDFYADSVKGRFTISRDNSKNTLYLQMNSLRAEDTAVYYCARRIAAAGHYGMDVWGQGTTVTVSS

SEQ ID NO: 30419 - DNA, 351 bp, synthetic construct; identical to SEQ ID NO: 30415
  misc_feature 1..351: note = Description of Artificial Sequence: Synthetic polynucleotide
  source 1..351: mol_type = other DNA

SEQ ID NO: 30420 - protein, 117 aa, synthetic construct; identical to SEQ ID NO: 30416
  REGION 1..117: note = Description of Artificial Sequence: Synthetic polypeptide

SEQ ID NO: 30421 - DNA, 369 bp, synthetic construct
  misc_feature 1..369: note = Description of Artificial Sequence: Synthetic polynucleotide
  source 1..369: mol_type = other DNA
caggtgcagctggtggagtctgggggaggcgtggtccagcctgggaggtccctgagactctcctgtgcagcgtctggattcacctttagtgactatgtcatgcagtgggtccgccaggctccaggcaaggggctggagtgggtggcagttatatggtatgatggaagtaataaatactatgcagactccgtgaagggccgattcaccatctccagagacaattccaagaacacgctgtatctgcaaatgaacagcctgagagccgaggacacggctgtgtattactgtgcgagagaaccgtataatagtggctggtacgactacggtatggacgtctggggccaagggaccacggtcaccgtctcctca

SEQ ID NO: 30422 - protein, 123 aa, synthetic construct; identical to SEQ ID NO: 30382
  REGION 1..123: note = Description of Artificial Sequence: Synthetic polypeptide

SEQ ID NO: 30423 - DNA, 342 bp, synthetic construct
  misc_feature 1..342: note = Description of Artificial Sequence: Synthetic polynucleotide
  source 1..342: mol_type = other DNA
gaggtgcaactggtggagtctgggggaggcctggtcaagcctggggggtccctgagattctcctgtgcagcctctggattcaccttcagtagttatagcatgaactgggtccgccaggctccagggaaggggctggagtgggtctcatccattagtggtagtagtacgtacatatactacgcagactcagtgaagggccgattcaccatctccagagacaacgccaagaactcactgtatctgcaaatgaacagcctgagagccgaagacacggctgtgtattactgcgcgagagatcggggcagcagctggggccagggaaccctggtcaccgtctcctca

SEQ ID NO: 30424 - protein, 114 aa, synthetic construct; identical to SEQ ID NO: 30344
  REGION 1..114: note = Description of Artificial Sequence: Synthetic polypeptide

SEQ ID NO: 30425 - DNA, 342 bp, synthetic construct
  misc_feature 1..342: note = Description of Artificial Sequence: Synthetic polynucleotide
  source 1..342: mol_type = other DNA
gaggtgcaactggtggagtctgggggaggcctggtcaagcctggggggtccttgagattctcctgtgcagcctctggattcaccttcagtagttatagcatgaaccgggtccgccaggctccagggaaggggctggagtgggtctcatccattagtggtagtagtacgtacatatactacgcagactcagtgaagggccgattcaccatctccagagacaacgccaagaactcactgtatctgcaaatgaacagcctgagagccgaagacacggctgtgtattactgcgcgagagatcggggcagcagctggggccagggaaccctggtcaccgtctcctca

SEQ ID NO: 30426 - protein, 114 aa, synthetic construct
  REGION 1..114: note = Description of Artificial Sequence: Synthetic polypeptide
EVQLVESGGGLVKPGGSLRFSCAASGFTFSSYSMNRVRQAPGKGLEWVSSISGSSTYIYYADSVKGRFTISRDNAKNSLYLQMNSLRAEDTAVYYCARDRGSSWGQGTLVTVSS

SEQ ID NO: 30427 - DNA, 354 bp, synthetic construct
  misc_feature 1..354: note = Description of Artificial Sequence: Synthetic polynucleotide
  source 1..354: mol_type = other DNA
caggtgcagctggtgcagtctgggtctgaggtgaagaagcctggggcctcagtgaaggtctcctgcaaggcttctggatacaccttcaccaattatgatatcaactgggtgcgacaggccactggacaagggcttgagtggatgggatggatgcaccctaacagtggtaacacaggctatgcacagaagttccagggcagagtcaccatgaccaggaacacctccatagacacagcctacatggaactgagcagcctgagttctgaggacacggccgtgtatttctgtgcgtttagcagtggctggtacttctttgactactggggccagggaaccctggtcaccgtctcctca

SEQ ID NO: 30428 - protein, 118 aa, synthetic construct
  REGION 1..118: note = Description of Artificial Sequence: Synthetic polypeptide
QVQLVQSGSEVKKPGASVKVSCKASGYTFTNYDINWVRQATGQGLEWMGWMHPNSGNTGYAQKFQGRVTMTRNTSIDTAYMELSSLSSEDTAVYFCAFSSGWYFFDYWGQGTLVTVSS

SEQ ID NO: 30429 - DNA, 354 bp, synthetic construct; identical to SEQ ID NO: 30369
  misc_feature 1..354: note = Description of Artificial Sequence: Synthetic polynucleotide
  source 1..354: mol_type = other DNA

SEQ ID NO: 30430 - protein, 118 aa, synthetic construct; identical to SEQ ID NO: 30370
  REGION 1..118: note = Description of Artificial Sequence: Synthetic polypeptide

SEQ ID NO: 30431 - DNA, 372 bp, synthetic construct
  misc_feature 1..372: note = Description of Artificial Sequence: Synthetic polynucleotide
  source 1..372: mol_type = other DNA
caggtgcagctggtggagtctgggggaggcgtggtccagcctgggaggtccctgagactctcctgtgcagcgtctggattcaccttcaataactatggcatgcactgggtccgccaggctccaggcaaggggctggagtgggtggcagttatatggtatgatggaagtaataaatactatgcagactccgtgaagggccgattcaccatctccagagacaattccaagaacacgctgtatctgcaaatgaacagcctgagagccgaggacacggctgtgtattactgtgcgagaaaaggtatagcagcagttggagactactactacggtatggacgtctggggccaagggaccacggtcaccgtctcctca

SEQ ID NO: 30432 - protein, 124 aa, synthetic construct
  REGION 1..124: note = Description of Artificial Sequence: Synthetic polypeptide
QVQLVESGGGVVQPGRSLRLSCAASGFTFNNYGMHWVRQAPGKGLEWVAVIWYDGSNKYYADSVKGRFTISRDNSKNTLYLQMNSLRAEDTAVYYCARKGIAAVGDYYYGMDVWGQGTTVTVSS

SEQ ID NO: 30433 - DNA, 345 bp, synthetic construct
  misc_feature 1..345: note = Description of Artificial Sequence: Synthetic polynucleotide
  source 1..345: mol_type = other DNA
gaggtgcagctggtggactctgggggaggcctggtcaagcctggggggtccctgagactctcctgtgcagcctctggattcaccttcagtagctatagcatgaactgggtccgccaggctccagggaaggggctggagtgggtctcatccattagtggtagtggtagttacatatactacgcagactcagtgaagggccgattcaccacctccagagacaacgccaagaactcactgtatctgcaaatgaacagcctgagcgccgacgacacggctgtttattactgtacgctctatagcagctcgcactattggggccagggaaccctggtcaccgtctcctca

SEQ ID NO: 30434 - protein, 115 aa, synthetic construct
  REGION 1..115: note = Description of Artificial Sequence: Synthetic polypeptide
EVQLVDSGGGLVKPGGSLRLSCAASGFTFSSYSMNWVRQAPGKGLEWVSSISGSGSYIYYADSVKGRFTTSRDNAKNSLYLQMNSLSADDTAVYYCTLYSSSHYWGQGTLVTVSS

SEQ ID NO: 30435 - DNA, 342 bp, synthetic construct
  misc_feature 1..342: note = Description of Artificial Sequence: Synthetic polynucleotide
  source 1..342: mol_type = other DNA
gaggtgcaactggtggagtctgggggaggcctggtccagcctggggggtccctgagactctcctgtgcagcctctggattcaccttcagtagctatagcatgaactgggtccgccaggctccagggaaggggctggagtgggtctcctccactagtgggagttctacttacatatactacgcagactcagtgaagggccgattcaccatctccagagacaacgccaagaacttagtgtatctgcaaatgaacagcctgagacccgaggacacggctgtgtattactgtgcgagagatcgaggcagcctctggggccagggaaccctggtcaccgtctcctca

SEQ ID NO: 30436 - protein, 114 aa, synthetic construct
  REGION 1..114: note = Description of Artificial Sequence: Synthetic polypeptide
EVQLVESGGGLVQPGGSLRLSCAASGFTFSSYSMNWVRQAPGKGLEWVSSTSGSSTYIYYADSVKGRFTISRDNAKNLVYLQMNSLRPEDTAVYYCARDRGSLWGQGTLVTVSS

SEQ ID NO: 30437 - DNA, 345 bp, synthetic construct
  misc_feature 1..345: note = Description of Artificial Sequence: Synthetic polynucleotide
  source 1..345: mol_type = other DNA
gaggtgcagctggtggagtctgggggaggcctggtcaagcctggggggtccctgagactctcctgtgcagcctctggattcaccttcagtagttatagcatgagctgggtccgccaggctccagggaaggggctggagtgggtctcatccattagtggtagtagtgcttacatatactacgcagactcagtgaagggccgattcaccatctccagagacaacgccaagaactcactgtatctgcaaatgaacagcctgagagccgaggacacggctgtgtattactgtgcgagattgagcggtatggacgtctggggccaagggaccacggtcaccgtctcctca

SEQ ID NO: 30438 - protein, 115 aa, synthetic construct
  REGION 1..115: note = Description of Artificial Sequence: Synthetic polypeptide
EVQLVESGGGLVKPGGSLRLSCAASGFTFSSYSMSWVRQAPGKGLEWVSSISGSSAYIYYADSVKGRFTISRDNAKNSLYLQMNSLRAEDTAVYYCARLSGMDVWGQGTTVTVSS

SEQ ID NO: 30439 - DNA, 342 bp, synthetic construct
  misc_feature 1..342: note = Description of Artificial Sequence: Synthetic polynucleotide
  source 1..342: mol_type = other DNA
gaggtgcagctggtggagtctgggggaggcctggtccagccgggggggtccctgagactctcctgtgcagcctctggattcaccttcagtagctatagcatgaactgggtccgccaggctccagggaaggggctggagtgggtctcatccattagtggtagtagtacttacatatactacgcagactcagtgaagggccgattcaccatctccagagacaacgccaagaactcactgtatctgcaaatgaacagcctgagagccgaggacacggctgtgtattactgtgcgagagatcgaggcagcctctggggccagggaaccctggtcaccgtctcctca

SEQ ID NO: 30440 - protein, 114 aa, synthetic construct
  REGION 1..114: note = Description of Artificial Sequence: Synthetic polypeptide
EVQLVESGGGLVQPGGSLRLSCAASGFTFSSYSMNWVRQAPGKGLEWVSSISGSSTYIYYADSVKGRFTISRDNAKNSLYLQMNSLRAEDTAVYYCARDRGSLWGQGTLVTVSS

SEQ ID NO: 30441 - DNA, 342 bp, synthetic construct
  misc_feature 1..342: note = Description of Artificial Sequence: Synthetic polynucleotide
  source 1..342: mol_type = other DNA
gaggtgcagttggtggagtctgggggaggcctggtcaagcctggggggtccctgagactctcctgtgcagcctctggattcaccttcagtagctatagcatgaactgggtccgccaggctccagggaaggggctggagtgggtctcatccattagtggtagtagtacttacatatactacgcagactcagtgaagggccgattcaccatctccagagacaacgccaagaactcactgtatctgcaaatgaacagcctgagagccgaggacacggctgtgtattactgtgcgagagcccgtatggacgtctggggccaagggaccacggtcaccgtctcctca

SEQ ID NO: 30442 - protein, 114 aa, synthetic construct
  REGION 1..114: note = Description of Artificial Sequence: Synthetic polypeptide
EVQLVESGGGLVKPGGSLRLSCAASGFTFSSYSMNWVRQAPGKGLEWVSSISGSSTYIYYADSVKGRFTISRDNAKNSLYLQMNSLRAEDTAVYYCARARMDVWGQGTTVTVSS

SEQ ID NO: 30443 - DNA, 354 bp, synthetic construct
  misc_feature 1..354: note = Description of Artificial Sequence: Synthetic polynucleotide
  source 1..354: mol_type = other DNA
caggtgcagctggtgcagtctggggctgaggtgaagaagcctggggcctcagtgaaggtctcctgcaaggcttctggatacaccttcacccattatgatatcaactgggtgcgacaggccactggacaagggcttgagtgggtggggtggatgcaccctaacagtcataagacaggctatgcacagaagttccagggcagagtcaccatgaccaggaacacctccaacagcacagcctacatggacctcagcagcctgagatctgaggacacggccgtgtattactgtgcttatagcagtggctggtacatgtttgactactggggccagggaaccctggtcaccgtctcctca

SEQ ID NO: 30444 - protein, 118 aa, synthetic construct
  REGION 1..118: note = Description of Artificial Sequence: Synthetic polypeptide
QVQLVQSGAEVKKPGASVKVSCKASGYTFTHYDINWVRQATGQGLEWVGWMHPNSHKTGYAQKFQGRVTMTRNTSNSTAYMDLSSLRSEDTAVYYCAYSSGWYMFDYWGQGTLVTVSS

SEQ ID NO: 30445 - DNA, 345 bp, synthetic construct
  misc_feature 1..345: note = Description of Artificial Sequence: Synthetic polynucleotide
  source 1..345: mol_type = other DNA
gaggtgcagctggtggagtctgggggagccctggtcaagcctggggggtccctgagactctcctgtgcagcctctggattcaccttcagtagctatagcatgagctgggtccgccaggctccagggaaggggctggggtgggtctcatccattagtgggagtagtagttacagttactacgcagactcagtgaagggccgattcaccatctccagagacaatgccaagaactcactgtatctgcaaatgaacagcctgagagccgaggacacggctgtgtattactgtgcgagactaactggctttgactactggggccagggaaccctggtcaccgtctcctca

SEQ ID NO: 30446 - protein, 115 aa, synthetic construct
  REGION 1..115: note = Description of Artificial Sequence: Synthetic polypeptide
EVQLVESGGALVKPGGSLRLSCAASGFTFSSYSMSWVRQAPGKGLGWVSSISGSSSYSYYADSVKGRFTISRDNAKNSLYLQMNSLRAEDTAVYYCARLTGFDYWGQGTLVTVSS

SEQ ID NO: 30447 - DNA, 372 bp, synthetic construct
  misc_feature 1..372: note = Description of Artificial Sequence: Synthetic polynucleotide
  source 1..372: mol_type = other DNA
caggtgcagctggtggagtctgggggaggcgtggtccagcctgggaggtccctgagactctcctgtgcagcgtctggattcacctttagtagctttggcatgcactgggtccgccaggctccaggcaagggcctggagtgggtggcagtcatatggtatgatggaacttataaatactatgcagactccgtgaagggccgattcaccatctccagagacaattccaagaacacgctgtatctgcaaatgaacagcctgagagccgaggacacggctgtgtattactgtgcgagagttggtattgaagtggctggtgactactactacggtatggaagtctggggccaagggaccacggtcaccgtctcctca

SEQ ID NO: 30448 - protein, 124 aa, synthetic construct
  REGION 1..124: note = Description of Artificial Sequence: Synthetic polypeptide
QVQLVESGGGVVQPGRSLRLSCAASGFTFSSFGMHWVRQAPGKGLEWVAVIWYDGTYKYYADSVKGRFTISRDNSKNTLYLQMNSLRAEDTAVYYCARVGIEVAGDYYYGMEVWGQGTTVTVSS

SEQ ID NO: 30449 - DNA, 372 bp, synthetic construct
  misc_feature 1..372: note = Description of Artificial Sequence: Synthetic polynucleotide
  source 1..372: mol_type = other DNA
caggtgcagttggtggagtctgggggaggcgtggtccagcctgggaggtcccagagactctcctgtgcagcgtctggattcacctttagtagctttggcatgcactgggtccgccaggctccaggcaagggcctggagtgggtggcagtcatatggtatgatggaagttataagtaccatgcagactccgtgaagggccgattcaccatctccagagacaattccaagaacacgctgtatctgcaaatgaacagcctgagagccgaggacacggctgtgtattactgtgcgagagttggtatagaagtggctggtgactactactacggtatggaagtctggggccaagggaccacggtcaccgtctcctca

SEQ ID NO: 30450 - protein, 124 aa, synthetic construct
  REGION 1..124: note = Description of Artificial Sequence: Synthetic polypeptide
QVQLVESGGGVVQPGRSQRLSCAASGFTFSSFGMHWVRQAPGKGLEWVAVIWYDGSYKYHADSVKGRFTISRDNSKNTLYLQMNSLRAEDTAVYYCARVGIEVAGDYYYGMEVWGQGTTVTVSS

SEQ ID NO: 30451 - DNA, 345 bp, synthetic construct
  misc_feature 1..345: note = Description of Artificial Sequence: Synthetic polynucleotide
  source 1..345: mol_type = other DNA
gaggtgcagctgttggagtctgggggaggcttggtacagccgggggggtccctgagactctcctgtgcagcctctggattcacctttagtagctatgtcatgagctgggtccgccaggctccagggaaggggctggagtgggtctcagctatgagtggtagtggtggtagaacatactacgcagactccgtgaagggccggttcaccatctccagagacaattccaagaacacgctgtatctgcaaatgaacagcctgagagccgaggacacggccgtgtattactgtgcgaagtatacctggaacggctactggggccagggaaccctggtcaccgtctcctca

SEQ ID NO: 30452 - protein, 115 aa, synthetic construct
  REGION 1..115: note = Description of Artificial Sequence: Synthetic polypeptide
EVQLLESGGGLVQPGGSLRLSCAASGFTFSSYVMSWVRQAPGKGLEWVSAMSGSGGRTYYADSVKGRFTISRDNSKNTLYLQMNSLRAEDTAVYYCAKYTWNGYWGQGTLVTVSS

SEQ ID NO: 30453 - DNA, 366 bp, synthetic construct
  misc_feature 1..366: note = Description of Artificial Sequence: Synthetic polynucleotide
  source 1..366: mol_type = other DNA
caggtgcagctggtggagtctgggggaggcgtggtccagcctgggaggtccctgagactctcctgtgcagcgtctggattcaccttcagtagctatggcatgcactgggtccgccaggctccaggcaaggggctggagtgggtggcagttatatggtatgatggaagtaataaatactatgcagactccgtgaggggccgattcaccatctccagagacaattccaagaacacgctgtatctgcaaatgaacagcctgagagccgaagacacggctgtgtattactgtgcgagagatcccttacgtggatacaatgacccggttatggactactggggccagggaaccctggtcaccgtctcctca

SEQ ID NO: 30454 - protein, 122 aa, synthetic construct
  REGION 1..122: note = Description of Artificial Sequence: Synthetic polypeptide
QVQLVESGGGVVQPGRSLRLSCAASGFTFSSYGMHWVRQAPGKGLEWVAVIWYDGSNKYYADSVRGRFTISRDNSKNTLYLQMNSLRAEDTAVYYCARDPLRGYNDPVMDYWGQGTLVTVSS

SEQ ID NO: 30455 - DNA, 357 bp, synthetic construct
  misc_feature 1..357: note = Description of Artificial Sequence: Synthetic polynucleotide
  source 1..357: mol_type = other DNA
caggtgcagctgcaggagtcgggcccaggactggtgaagccttcggagaccctgtccctcacctgcactgtctctggtggctccatcagtagttactactggagttggatccggcagcccgccgggaagggactggagtggattgggcgtatcgataccagtgggatcaccaactacaacccctccctcaagagtcgagtcaccatgtcaatagacacgtccaagagccagatctccctgaagctgagctctgtgaccgccgcggacacggccgtgtattactgtgcgagagagggaggagtgggagctacctactttgactactggggccagggaaccctggtcaccgtctcctca

SEQ ID NO: 30456 - protein, 119 aa, synthetic construct
  REGION 1..119: note = Description of Artificial Sequence: Synthetic polypeptide
QVQLQESGPGLVKPSETLSLTCTVSGGSISSYYWSWIRQPAGKGLEWIGRIDTSGITNYNPSLKSRVTMSIDTSKSQISLKLSSVTAADTAVYYCAREGGVGATYFDYWGQGTLVTVSS

SEQ ID NO: 30457 - DNA, 369 bp, synthetic construct
  misc_feature 1..369: note = Description of Artificial Sequence: Synthetic polynucleotide
  source 1..369: mol_type = other DNA
gaggtgcaactggtggagtctgggggaggcttggtacagccgggggggtccctgagactctcctgtgcagcctcaggattcaccttcagtggccatagcatgaactgggtccgccaggctccagggaaggggctggagtgggttgcatacattagccttagtggtagtaccataaagtacgcagactctgtgaagggccgattcaccatctccagagacaatgccagggactcactgtatctgcaaatgaacagcctgagagacgaggacacggctgtgtattactgtgcgagaagggggattactgtggttcggaatgaggacggtttggacgtctggggccaagggaccacggtcaccgtctcctca

SEQ ID NO: 30458 - protein, 123 aa, synthetic construct
  REGION 1..123: note = Description of Artificial Sequence: Synthetic polypeptide
EVQLVESGGGLVQPGGSLRLSCAASGFTFSGHSMNWVRQAPGKGLEWVAYISLSGSTIKYADSVKGRFTISRDNARDSLYLQMNSLRDEDTAVYYCARRGITVVRNEDGLDVWGQGTTVTVSS

SEQ ID NO: 30459 - DNA, 366 bp, synthetic construct
  misc_feature 1..366: note = Description of Artificial Sequence: Synthetic polynucleotide
  source 1..366: mol_type = other DNA
caggtgcagctggtggagtctgggggaggcgtggtccagcctgggaggtccctgagactctcctgtgcagcgtctggattcaccttcagtacctatggcatgcactgggtccgccaggctccaggcaaggggctggagtgggtgtcaattatatggtatgatggaactaataaatactatgcagactccgtgaagggccgattcaccatctccagagacaattccaagaacacgctgtatctgcaactgaacagcctgagagccgaggacacggctgtgtattactgtgcgcgagatcccttacgtggatacaatgacccggttatggactactggggccagggaaccctggtcaccgtctcctca

SEQ ID NO: 30460 - protein, 122 aa, synthetic construct
  REGION 1..122: note = Description of Artificial Sequence: Synthetic polypeptide
QVQLVESGGGVVQPGRSLRLSCAASGFTFSTYGMHWVRQAPGKGLEWVSIIWYDGTNKYYADSVKGRFTISRDNSKNTLYLQLNSLRAEDTAVYYCARDPLRGYNDPVMDYWGQGTLVTVSS

SEQ ID NO: 30461 - DNA, 357 bp, synthetic construct
  misc_feature 1..357: note = Description of Artificial Sequence: Synthetic polynucleotide
  source 1..357: mol_type = other DNA
caggtgcagctgcaggagtcgggcccaggactggtgaagccttcggagaccctgtccctcacctgcactgtctctggtggctccatcagtagttactactggagttggatccggcagcccgccgggaagggactggagtggattgggcgtatcgataccagtgggatcaccaactacaacccctccctcaagagtcgagtcaccatgtcagtagacacgtccaagagccagatctccctgaagctgagctctgtgaccgccgcggacacggccgtgtattactgtgcgagagagggaggagtgggagctacctactttgactactggggccagggaaccctggtcaccgtctcctca

SEQ ID NO: 30462 - protein, 119 aa, synthetic construct
  REGION 1..119: note = Description of Artificial Sequence: Synthetic polypeptide
QVQLQESGPGLVKPSETLSLTCTVSGGSISSYYWSWIRQPAGKGLEWIGRIDTSGITNYNPSLKSRVTMSVDTSKSQISLKLSSVTAADTAVYYCAREGGVGATYFDYWGQGTLVTVSS

SEQ ID NO: 30463 - DNA, 369 bp, synthetic construct
  misc_feature 1..369: note = Description of Artificial Sequence: Synthetic polynucleotide
  source 1..369: mol_type = other DNA
gaggtgcaactggtggagtctgggggaggcttggtacagcctggggggtccctgagactctcctgtgcagcctcaggattcaccttcagtggccatagcatgaactgggtccgccaggctccagggaaggggctggagtgggttgcatacattagcattagtagtagtaccataaagtacgcagactctgtgaagggccgattcaccatctccagagacaatgccagggactcactgtatctgcaaatgaacagcctgagagacgaggacacggctgtgtattactgtgcgagaagggggattactgtggttcggaatgaggacggtttggacgtctggggccaagggaccacggtcaccgtctcctca

SEQ ID NO: 30464 - protein, 123 aa, synthetic construct
  REGION 1..123: note = Description of Artificial Sequence: Synthetic polypeptide
EVQLVESGGGLVQPGGSLRLSCAASGFTFSGHSMNWVRQAPGKGLEWVAYISISSSTIKYADSVKGRFTISRDNARDSLYLQMNSLRDEDTAVYYCARRGITVVRNEDGLDVWGQGTTVTVSS

SEQ ID NO: 30465 - DNA, 354 bp, synthetic construct
  misc_feature 1..354: note = Description of Artificial Sequence: Synthetic polynucleotide
  source 1..354: mol_type = other DNA
caggtgcagctgcaggagtcgggcccaggactggtgaagccttcggagaccctgtccctcacctgcactgtctctggtggctccatcagtagttactactggacctggatccggcagcccgccgggaagggactggagtggattgggcgtatctataccagtgggagcaccaactacaacccctccctcaagagtcgagtcaccatgtcagtagacacgtccaagaaccagttctccctgaagctgagctctgtgaccgccgcggacacggccgtgtatttctgtgcgaaagtcgggaggtactactacggtatggacgtctggggccaagggaccacggtcaccgtctcctca

SEQ ID NO: 30466 - protein, 118 aa, synthetic construct
  REGION 1..118: note = Description of Artificial Sequence: Synthetic polypeptide
QVQLQESGPGLVKPSETLSLTCTVSGGSISSYYWTWIRQPAGKGLEWIGRIYTSGSTNYNPSLKSRVTMSVDTSKNQFSLKLSSVTAADTAVYFCAKVGRYYYGMDVWGQGTTVTVSS

SEQ ID NO: 30467 - DNA, 366 bp, synthetic construct
  misc_feature 1..366: note = Description of Artificial Sequence: Synthetic polynucleotide
  source 1..366: mol_type = other DNA
caggtgcagctggtgcagtctggggctgaggtgaagaagcctggggcctcagtgagggtctcctgcaaggcttctggatacaccttcaccggctactttatgcactgggtgcgacaggcccctggacaagggcttgagtggatgggatggatcaagcctaagagtggtggcacaaactctgcacagaggtttcagggcagggtcaccatgaccagggacacgtccatcaacacagcctacatggagctgaacaggctgagatctgacgacacggccgtgtattactgtgcgagaggggggactacggtggctacgtggggggtctttgactactggggccagggaaccctggtcaccgtctcctca

SEQ ID NO: 30468 - protein, 122 aa, synthetic construct
  REGION 1..122: note = Description of Artificial Sequence: Synthetic polypeptide
QVQLVQSGAEVKKPGASVRVSCKASGYTFTGYFMHWVRQAPGQGLEWMGWIKPKSGGTNSAQRFQGRVTMTRDTSINTAYMELNRLRSDDTAVYYCARGGTTVATWGVFDYWGQGTLVTVSS

SEQ ID NO: 30469 - DNA, 345 bp, synthetic construct
  misc_feature 1..345: note = Description of Artificial Sequence: Synthetic polynucleotide
  source 1..345: mol_type = other DNA
gaggtgcagttgttggagtctgggggaggcttggtgcagtctggggggtccctgagactctcctgtgcagcctctggattcacctttagcagctatgtcatgagttgggtccgccaggctccagggaaggggctggagtgggtctcagctattagtggtagtggtagtagaatatactacgcggactccgtgaagggccggttcaccatctccagagacaattccaagaacacgctgtatctgcaaatgaacagcctgagagccgaggacacggccttatattactgtgcgagagtggctttctttgactattggggccagggaaccctggtcaccgtctcctca

SEQ ID NO: 30470 - protein, 115 aa, synthetic construct
  REGION 1..115: note = Description of Artificial Sequence: Synthetic polypeptide
EVQLLESGGGLVQSGGSLRLSCAASGFTFSSYVMSWVRQAPGKGLEWVSAISGSGSRIYYADSVKGRFTISRDNSKNTLYLQMNSLRAEDTALYYCARVAFFDYWGQGTLVTVSS

SEQ ID NO: 30471 - DNA, 369 bp, synthetic construct
  misc_feature 1..369: note = Description of Artificial Sequence: Synthetic polynucleotide
  source 1..369: mol_type = other DNA
caggtgcagctggtggagtctgggggaggcgtggtccagcctgggaggtccctgagactctcctgtgcagcgtctggattcaccttcagtgactatgtcatgcactgggtccgccaggctccaggcaaggggctggagtgggtggcagttatatggtatgatggaagtaataaatactatgcagactccgtgaagggccgattcaccatctccagagacaattccaagaacacgctgtatctgcaattgaacagcctgagagccgaggacacggctgtgtattactgtgcgagagaaaggtatagcagtggctggtacgactacggtatggacgtctggggccaagggaccacggtcaccgtctcctca

SEQ ID NO: 30472 - protein, 123 aa, synthetic construct
  REGION 1..123: note = Description of Artificial Sequence: Synthetic polypeptide
QVQLVESGGGVVQPGRSLRLSCAASGFTFSDYVMHWVRQAPGKGLEWVAVIWYDGSNKYYADSVKGRFTISRDNSKNTLYLQLNSLRAEDTAVYYCARERYSSGWYDYGMDVWGQGTTVTVSS

SEQ ID NO: 30473 - DNA, 363 bp, synthetic construct
  misc_feature 1..363: note = Description of Artificial Sequence: Synthetic polynucleotide
  source 1..363: mol_type = other DNA
caggtgcagctggtggagtctgggggaggcgtggtccagcctgggaggtccctgagactctcctgtgcagcgtctggattcaccttcagtagctatggcatgcactgggtccgccaggctccaggcaaggggctggagtgggtggcaattatatggtatgatggaagttataaatactatgcagattccgtgaagggccgattcaccatctccagagacaattccaagaacacactgtatctgcaaatgaacagcctgagagccgaggacacggctgtgtattactgtgcgagagatgcccacgatttttggagtggttactttgactcctggggccagggaaccctggtcaccgtctcctca

SEQ ID NO: 30474 - protein, 121 aa, synthetic construct
  REGION 1..121: note = Description of Artificial Sequence: Synthetic polypeptide
QVQLVESGGGVVQPGRSLRLSCAASGFTFSSYGMHWVRQAPGKGLEWVAIIWYDGSYKYYADSVKGRFTISRDNSKNTLYLQMNSLRAEDTAVYYCARDAHDFWSGYFDSWGQGTLVTVSS

SEQ ID NO: 30475 - DNA, 345 bp, synthetic construct
  misc_feature 1..345: note = Description of Artificial Sequence: Synthetic polynucleotide
  source 1..345: mol_type = other DNA
gaggtgcagttgttggagtctgggggaggcttggtacagcctggggggtccctgagactctcctgtgcagcctctggattcacctttagcagctatgtcatgagttgggtccgccaggctccagggaaggggctggagtgggtctcagctattagtggtagtggtaatagaatatactacgcagactccgtgaagggccggttcaccatctccagagacaattccaagaacacgctgtatctgcaaatgaacagcctgagagccgaggacacggccttatattactgtgcgagagtggctttctttgactattggggccagggaaccctggtcaccgtctcctca

SEQ ID NO: 30476 - protein, 115 aa, synthetic construct
  REGION 1..115: note = Description of Artificial Sequence: Synthetic polypeptide
EVQLLESGGGLVQPGGSLRLSCAASGFTFSSYVMSWVRQAPGKGLEWVSAISGSGNRIYYADSVKGRFTISRDNSKNTLYLQMNSLRAEDTALYYCARVAFFDYWGQGTLVTVSS

SEQ ID NO: 30477 - DNA, 354 bp, synthetic construct
  misc_feature 1..354: note = Description of Artificial Sequence: Synthetic polynucleotide
  source 1..354: mol_type = other DNA
caggtgcagctgcaggagtcgggcccaggactggtgaagccttcggagaccctgtccctcacctgcactgtctctggtggctccatcagtagttattactggagctggatccggcagcccgccgggaagggactggagtggattgggcgtatctataccagtgggagcaccaactacaacccctccctcaagagtcgagtcaccatgtcagtagacacgtccaagaaccagttctccctgaagctgagctctgtgaccgccgcggacacggccgtgtattactgtgcgagagtcgggaggtactactatggtatggacgtctggggccaagggaccacggtcaccgtctcctca

SEQ ID NO: 30478 - protein, 118 aa, synthetic construct
  REGION 1..118: note = Description of Artificial Sequence: Synthetic polypeptide
QVQLQESGPGLVKPSETLSLTCTVSGGSISSYYWSWIRQPAGKGLEWIGRIYTSGSTNYNPSLKSRVTMSVDTSKNQFSLKLSSVTAADTAVYYCARVGRYYYGMDVWGQGTTVTVSS

SEQ ID NO: 30479 - DNA, 369 bp, synthetic construct
  misc_feature 1..369: note = Description of Artificial Sequence: Synthetic polynucleotide
  source 1..369: mol_type = other DNA
caggtgcagctggtggaatctgggggaggcgtggtccagcctgggaggtccctgagactctcctgtgcagcgtctggattctccttcagtgactatgtcatgcactgggtccgccaggctccaggcaaggggctggagtgggtggcagttatatggtatgatggaagtaataaatactatgaagactccgtgaagggccgattcaccatctccagagacaattccaagaacacgctgtatctgcaaatgaacagcctgagagccgaggacacggctgtgtattactgtgcgagagagacgtatagcagcagctggtacgactacggtatggacgtctggggccaagggaccacggtcaccgtctcctca

SEQ ID NO: 30480 - protein, 123 aa, synthetic construct
  REGION 1..123: note = Description of Artificial Sequence: Synthetic polypeptide
QVQLVESGGGVVQPGRSLRLSCAASGFSFSDYVMHWVRQAPGKGLEWVAVIWYDGSNKYYEDSVKGRFTISRDNSKNTLYLQMNSLRAEDTAVYYCARETYSSSWYDYGMDVWGQGTTVTVSS

SEQ ID NO: 30481 - DNA, 366 bp, synthetic construct
  misc_feature 1..366: note = Description of Artificial Sequence: Synthetic polynucleotide
  source 1..366: mol_type = other DNA
caggtgcagctggtggagtctgggggaggcgtggtccagcctgggaggtccctgagactctcctgtacagcgtctggattcaccttcagtacctatggcatgcactgggtccgccaggctccaggcaaggggctggagtgggtgtcaattatatggtatgatggaactaataaatactatgcagactccgtgaagggccgattcaccatctccagagacaattccaagaacacgctgtttctgcaactgaacagcctgagagccgaggacacggctatgtattactgtgcgcgagatcccttacgtggatacaatgacccggttatggactactggggccagggaaccctggtcaccgtctcctca

SEQ ID NO: 30482 - protein, 122 aa, synthetic construct
  REGION 1..122: note = Description of Artificial Sequence: Synthetic polypeptide
QVQLVESGGGVVQPGRSLRLSCTASGFTFSTYGMHWVRQAPGKGLEWVSIIWYDGTNKYYADSVKGRFTISRDNSKNTLFLQLNSLRAEDTAMYYCARDPLRGYNDPVMDYWGQGTLVTVSS

SEQ ID NO: 30483 - DNA, 366 bp, synthetic construct
  misc_feature 1..366: note = Description of Artificial Sequence: Synthetic polynucleotide
  source 1..366: mol_type = other DNA
caggtgcagctggtggagtctgggggaggcgtggtccagcctgggaggtccctgagactctcctgtgcagcgtctggattcaccttcagtagctatggcatgcactgggtccgccaggctccaggcaaggggctggagtgggtggcaattatatggtatgatggaactaataaatactatgcagactccgtgaagggccgattcaccatctccagagacaattccaagaacacgctgtatctgcaactgaacagcctgagagccgaggacacggctgtgtattactgtgcgcgagatcccttacgtggatacaatgacccggttatggactactggggccagggaaccctggtcaccgtctcctca

SEQ ID NO: 30484 - protein, 122 aa, synthetic construct
  REGION 1..122: note = Description of Artificial Sequence: Synthetic polypeptide
QVQLVESGGGVVQPGRSLRLSCAASGFTFSSYGMHWVRQAPGKGLEWVAIIWYDGTNKYYADSVKGRFTISRDNSKNTLYLQLNSLRAEDTAVYYCARDPLRGYNDPVMDYWGQGTLVTVSS

SEQ ID NO: 30485 - DNA, 366 bp, synthetic construct
  misc_feature 1..366: note = Description of Artificial Sequence: Synthetic polynucleotide
  source 1..366: mol_type = other DNA
caggtgcagctggtggagtctgggggaggcgtggtccagcctggggggtccctgagactctcctgtgcagcgtctggcttcaccttcagtacctatggcatgcactgggtccgccaggctccaggcaaggggctggagtgggtgacaattatatggtatgatgggactaataaatactatgcagactccgtgaagggccgattcaccatctccagagacaattccaagagcacgctgtatctgcaaatgaacagcctgagagccgaggacacggctgtgtatttctgtgcgagagatcccttacgtggatacaatgacccggttatggactactggggccagggaaccctggtcaccgtctcctca

SEQ ID NO: 30486 - protein, 122 aa, synthetic construct
  REGION 1..122: note = Description of Artificial Sequence: Synthetic polypeptide
QVQLVESGGGVVQPGGSLRLSCAASGFTFSTYGMHWVRQAPGKGLEWVTIIWYDGTNKYYADSVKGRFTISRDNSKSTLYLQMNSLRAEDTAVYFCARDPLRGYNDPVMDYWGQGTLVTVSS

SEQ ID NO: 30487 - DNA, 366 bp, synthetic construct
  misc_feature 1..366: note = Description of Artificial Sequence: Synthetic polynucleotide
  source 1..366: mol_type = other DNA
caggtgcagctggtgcagtctggggctgaggtgaagaagcctggggcctcagtgagggtctcctgcaaggcttctggatacaccttcaccggctactttatacactgggtgcgacaggcccctggacaagggcttgagtggatgggatggatcaagcctaacagtggtggcacaaactctgcacagaggtttcagggcagggtcaccatgaccagggacacgtccatcaacacagcctacatggagctgaacaggctgagatctgacgacacggccgtgtattactgtgcgagaggggggactacggtggctacgtggggggtctttgactactggggccagggaaccctggtcaccgtctcctca

SEQ ID NO: 30488 - protein, 122 aa, synthetic construct
  REGION 1..122: note = Description of Artificial Sequence: Synthetic polypeptide
QVQLVQSGAEVKKPGASVRVSCKASGYTFTGYFIHWVRQAPGQGLEWMGWIKPNSGGTNSAQRFQGRVTMTRDTSINTAYMELNRLRSDDTAVYYCARGGTTVATWGVFDYWGQGTLVTVSS

SEQ ID NO: 30489 - DNA, 354 bp, synthetic construct
  misc_feature 1..354: note = Description of Artificial Sequence: Synthetic polynucleotide
  source 1..354: mol_type = other DNA
caggtgcagctggtgcagtctggggctgaggtgaagaagcctggggcctcagtgaaggtctcctgcaaggcttctggatacaccttcaccaattatgatatcaactgggtgcgacaggccactggacaagggcttgagtggatgggatggatgaaccctaacagtggtaacacaggctatgcacagaagttccaggacagagtcaccatgaccaggcacacctccataagcacagcctacatggagctgagcagcctgagatctgaggacacggccgtgtattactgtgcgattagcagtggctggtactggttcgacccctggggccagggaaccctggtcaccgtctcctca

SEQ ID NO: 30490 - protein, 118 aa, synthetic construct
  REGION 1..118: note = Description of Artificial Sequence: Synthetic polypeptide
QVQLVQSGAEVKKPGASVKVSCKASGYTFTNYDINWVRQATGQGLEWMGWMNPNSGNTGYAQKFQDRVTMTRHTSISTAYMELSSLRSEDTAVYYCAISSGWYWFDPWGQGTLVTVSS

SEQ ID NO: 30491 - DNA, 366 bp, synthetic construct
  misc_feature 1..366: note = Description of Artificial Sequence: Synthetic polynucleotide
  source 1..366: mol_type = other DNA
caggtgcagctggtggagtctgggggaggcgtggtccagcctgggaggtccctgagactctcctgtgtagcgtctggattcaccttcagtagctatggcatgcactgggtccgccaggctccaggcaaggggctggagtgggtggcaattatatggtatgatggaactaataaatactatgcagactccgtgaagggccgattcaccatctccagagacaattccaagaacacgctgtatctgcaactgaacagcctgagagccgaggacacggctgtgtattactgtgcgcgagatcccttacgtggatacaatgacccggttatggactactggggccagggaaccctggtcaccgtctcctca

SEQ ID NO: 30492 - protein, 122 aa, synthetic construct
  REGION 1..122: note = Description of Artificial Sequence: Synthetic polypeptide
QVQLVESGGGVVQPGRSLRLSCVASGFTFSSYGMHWVRQAPGKGLEWVAIIWYDGTNKYYADSVKGRFTISRDNSKNTLYLQLNSLRAEDTAVYYCARDPLRGYNDPVMDYWGQGTLVTVSS

SEQ ID NO: 30493 - DNA, 366 bp, synthetic construct
  misc_feature 1..366: note = Description of Artificial Sequence: Synthetic polynucleotide
  source 1..366: mol_type = other DNA
caggtgcagctggtggagtctgggggaggcgtggtccagcctggggggtccctgagactctcctgtgcagcgtctggcttcaccttcagtacctatggcatgcactgggtccgccaggctccaggcaaggggctggagtgggtgacaattatatggtatgatgggactaataaatactatgcagactccgtgaagggccgattcaccatctccagagacaattccaagaacacgctgtatctgcaaatgaacagcctgagagccgaggacacggctgtgtattactgtgcgagagatcccttacgtggatacaatgacccggttatggactactggggccagggaaccctggtcaccgtctcctca

SEQ ID NO: 30494 - protein, 122 aa, synthetic construct
  REGION 1..122: note = Description of Artificial Sequence: Synthetic polypeptide
QVQLVESGGGVVQPGGSLRLSCAASGFTFSTYGMHWVRQAPGKGLEWVTIIWYDGTNKYYADSVKGRFTISRDNSKNTLYLQMNSLRAEDTAVYYCARDPLRGYNDPVMDYWGQGTLVTVSS

SEQ ID NO: 30495 - DNA, 366 bp, synthetic construct
  misc_feature 1..366: note = Description of Artificial Sequence: Synthetic polynucleotide
  source 1..366: mol_type = other DNA
caggtgcaactggtggagtctgggggaggcgtggtccagcctggggggtccctgagactctcctgtgcagcgtctggcttcaccttcagtacctatggcatgcactgggtccgccaggctccaggcaaggggctggagtgggtggcaattatatggtatgatggaagtaataaatactatgcagactccgtgaagggccgattcaccatctccagagacaattccaagaacacgctgtatctgcaaatgaacagcctgagagccgaagacacggctgtgtattactgtgcgagagatcccttacgtggatacaatgacccggttatggactactggggccagggaaccctggtcaccgtctcctca

SEQ ID NO: 30496 - protein, 122 aa, synthetic construct
  REGION 1..122: note = Description of Artificial Sequence: Synthetic polypeptide
QVQLVESGGGVVQPGGSLRLSCAASGFTFSTYGMHWVRQAPGKGLEWVAIIWYDGSNKYYADSVKGRFTISRDNSKNTLYLQMNSLRAEDTAVYYCARDPLRGYNDPVMDYWGQGTLVTVSS

SEQ ID NO: 30497 - DNA, 360 bp, synthetic construct
  misc_feature 1..360: note = Description of Artificial Sequence: Synthetic polynucleotide
  source 1..360: mol_type = other DNA
gaggtgcagctgttggagtctgggggagacttagtacagcctggggggtccctgagactctcctgtgcagcctctggattcacctttagcagctgtgccatgacctgggtccgccaggctccagggaaggggctggagtgggtctcagctattagtggtcgtggtggtaccacgttctacgcagactccgtgaggggccggttcaccatctccagagacaattccaagaacacgctgtttctgcaaatgaacagcctgagagccgaggacacggccgtatattactgtgcgaaagatcttattgggggagctacttactttgactactggggccagggaaccctggtcaccgtctcctca

SEQ ID NO: 30498 - protein, 120 aa, synthetic construct
  REGION 1..120: note = Description of Artificial Sequence: Synthetic polypeptide
EVQLLESGGDLVQPGGSLRLSCAASGFTFSSCAMTWVRQAPGKGLEWVSAISGRGGTTFYADSVRGRFTISRDNSKNTLFLQMNSLRAEDTAVYYCAKDLIGGATYFDYWGQGTLVTVSS

SEQ ID NO: 30499 - DNA, 363 bp, synthetic construct
  misc_feature 1..363: note = Description of Artificial Sequence: Synthetic polynucleotide
  source 1..363: mol_type = other DNA
caggtgcagctggtggagtctaggggaggcgtggtccagcctgggaggtccctgagactctcctgtgcagcctctggattcaccttcagtagctatggcatgcactgggtccgccaggctccaggcaaggggctggagtgggtggcagttatatcatatgacggaaacaatagacactatgcagactccgtgcagggccgattcaccatttccagagacaattccaagaacacgctgtctctgcaaatgaacagcctgggagctgaggacacggctgtgtattactgtgcgagagatcgtcaccgtttggactactacgctttggacgtctggggccaagggaccacggtcaccgtctcctca

SEQ ID NO: 30500 - protein, 121 aa, synthetic construct
  REGION 1..121: note = Description of Artificial Sequence: Synthetic polypeptide
QVQLVESRGGVVQPGRSLRLSCAASGFTFSSYGMHWVRQAPGKGLEWVAVISYDGNNRHYADSVQGRFTISRDNSKNTLSLQMNSLGAEDTAVYYCARDRHRLDYYALDVWGQGTTVTVSS

SEQ ID NO: 30501 - DNA, 354 bp, synthetic construct
  misc_feature 1..354: note = Description of Artificial Sequence: Synthetic polynucleotide
  source 1..354: mol_type = other DNA
gaggtgcagttgttggagtctgggggaggcttggtacagcctggggggtccctgagactctcctgtgcagcctctggattcacctttaggagctctgccatgagctgggtccgccaggctccagggaaggggctggagtgggtctcagttattagtggtagtggtggtagcacattctacacagactccgtgaagggccggttcaccatctccagagacaattccaagaacacgctgtatctgcaaatgaacagcctgagagccgaggacacggccgtatattactgtgcgaaatcgaatagcagtggctggtttgactactggggccagggaaccctggtcaccgtctcctca

SEQ ID NO: 30502 - protein, 118 aa, synthetic construct
  REGION 1..118: note = Description of Artificial Sequence: Synthetic polypeptide
EVQLLESGGGLVQPGGSLRLSCAASGFTFRSSAMSWVRQAPGKGLEWVSVISGSGGSTFYTDSVKGRFTISRDNSKNTLYLQMNSLRAEDTAVYYCAKSNSSGWFDYWGQGTLVTVSS

SEQ ID NO: 30503 - DNA, 363 bp, synthetic construct
  misc_feature 1..363: note = Description of Artificial Sequence: Synthetic polynucleotide
  source 1..363: mol_type = other DNA
gaggtgcagttgttggagtctgggggaggcttggcacagcctggggggtccctgagactctcctgtgcagcctctggattcacctttagcagctatgccatgacttgggtccgccaggctccagggaaggggctggagtgggtctcagctattagtggtagtggtggtaacacattcaacgcagactccgtgaagggccggttcaccatctccagagacaattccaagaacacgctgtatctgcaaatgaacagcctgagagccgaggacacggccgtatattactgtgcaaagctggggatcgactactactactacggtatggacgtctggggccaagggaccacggtcaccgtctcctca

SEQ ID NO: 30504 - protein, 121 aa, synthetic construct
  REGION 1..121: note = Description of Artificial Sequence: Synthetic polypeptide
EVQLLESGGGLAQPGGSLRLSCAASGFTFSSYAMTWVRQAPGKGLEWVSAISGSGGNTFNADSVKGRFTISRDNSKNTLYLQMNSLRAEDTAVYYCAKLGIDYYYYGMDVWGQGTTVTVSS

SEQ ID NO: 30505 - DNA, 342 bp, synthetic construct
  misc_feature 1..342: note = Description of Artificial Sequence: Synthetic polynucleotide
  source 1..342: mol_type = other DNA
gaggtgcagctggtggagtctgggggaggcctggtcaagcctggggggtccctgagactctcctgtgcagcctctggattcaccttcagtagctatagcatgaactgggtccgccaggctccagggaaggggctggagtgggtctcatccattagtggtagtagtagttacatatactacgcagactcagtgaagggccgattcaccatctccagagacaacgccaagaactcactgtatctgcaaatgaacagcctgagagccgaggacacggctgtgtattactgtgcgagagataggggcagctcctggggccagggaatcctggtcaccgtctcctca

SEQ ID NO: 30506 - protein, 114 aa, synthetic construct
  REGION 1..114: note = Description of Artificial Sequence: Synthetic polypeptide
EVQLVESGGGLVKPGGSLRLSCAASGFTFSSYSMNWVRQAPGKGLEWVSSISGSSSYIYYADSVKGRFTISRDNAKNSLYLQMNSLRAEDTAVYYCARDRGSSWGQGILVTVSS

SEQ ID NO: 30507 - DNA, 366 bp, synthetic construct
  misc_feature 1..366: note = Description of Artificial Sequence: Synthetic polynucleotide
  source 1..366: mol_type = other DNA
caggtgcagctggtggagtctgggggaggcgtggtccagcctgggaggcccctgagactctcctgtgcagcgtctggattcaccttcagtacctatggcatgcactgggtccgccaggctccaggcaaggggctggagtgggtggcagttatatggtatgatggaagtaataaatactatgcagactccgtgaagggccgattcaccatctccagagacaattccaagaacacgctgtatctgcaaatgaacagcctgagagccgaggacacggctgtgtattactgtgcgagagatcccttacgtggatacaatgacccggttatggactactggggccagggaaccctggtcaccgtctcctca

SEQ ID NO: 30508 - protein, 122 aa, synthetic construct
  REGION 1..122: note = Description of Artificial Sequence: Synthetic polypeptide
QVQLVESGGGVVQPGRPLRLSCAASGFTFSTYGMHWVRQAPGKGLEWVAVIWYDGSNKYYADSVKGRFTISRDNSKNTLYLQMNSLRAEDTAVYYCARDPLRGYNDPVMDYWGQGTLVTVSS

SEQ ID NO: 30509 - DNA, 363 bp, synthetic construct
  misc_feature 1..363: note = Description of Artificial Sequence: Synthetic polynucleotide
  source 1..363: mol_type = other DNA
caggtgcagctggtggagtctgggggaggcgtggtccagcctgggaggtccctgagactctcctgtgcagcgtctggattcaccttcagtaactatggcatgcactgggtccgccaggctccaggcaaggggctagagtgggtggcaattatatggtatgatggaagtaataaatactatgtagactccgtgaagggccgattcaccatctccagagacaattccaagaacacgctgtatctccaaatgaacagcctgagagccgaagacacggctgtgtactattgtgcgagagaggcgtacgatttttggagtggttattgggactactggggccagggaaccctggtcaccgtctcctca

SEQ ID NO: 30510 - protein, 121 aa, synthetic construct
  REGION 1..121: note = Description of Artificial Sequence: Synthetic polypeptide
QVQLVESGGGVVQPGRSLRLSCAASGFTFSNYGMHWVRQAPGKGLEWVAIIWYDGSNKYYVDSVKGRFTISRDNSKNTLYLQMNSLRAEDTAVYYCAREAYDFWSGYWDYWGQGTLVTVSS

SEQ ID NO: 30511 - DNA, 366 bp, synthetic construct
  misc_feature 1..366: note = Description of Artificial Sequence: Synthetic polynucleotide
  source 1..366: mol_type = other DNA
caggtgcagatggtggagtctgggggaggcgtggtccagcctgggaggtccctgagactctcctgtgcagcgtctggattcaccttcagtacctatggcatgcactgggtccgccaggctccaggcaaggggctggaatggatggcaattatatggtatgatggaactaataaatactatgcagactccgtgaagggccgattcaccatctccagagacaattccaagaacacgctgtatctgcaactgaacagcctgagagccgaggacacggctgtgtattactgtgcgcgagatcccttacgtggatacaatgacccggttatggactactggggccagggaaccctggtcaccgtctcctca

SEQ ID NO: 30512 - protein, 122 aa, synthetic construct
  REGION 1..122: note = Description of Artificial Sequence: Synthetic polypeptide
QVQMVESGGGVVQPGRSLRLSCAASGFTFSTYGMHWVRQAPGKGLEWMAIIWYDGTNKYYADSVKGRFTISRDNSKNTLYLQLNSLRAEDTAVYYCARDPLRGYNDPVMDYWGQGTLVTVSS

SEQ ID NO: 30513 - DNA, 354 bp, synthetic construct
  misc_feature 1..354: note = Description of Artificial Sequence: Synthetic polynucleotide
  source 1..354: mol_type = other DNA
caggtgcagctggtgcagtctggggctgaggtgaagaagcctggggcctcagtgatggtctcctgcaaggcttctggatacaccttcaccaattatgatatcaactgggtgcgacaggccactggacaagggcttgagtggatgggatggatgcaccctaacagtggtaacacaggctatgcacagaagttccagggcagagtcaccatgaccaggaacacctccataagcacagcctacatggagctgagcagcctgagatctgaggacacggccgtgtattactgtgcgtatagcagtggctggtaccggtttgactactggggccagggaaccctggtcaccgtctcctca

SEQ ID NO: 30514 - protein, 118 aa, synthetic construct
  REGION 1..118: note = Description of Artificial Sequence: Synthetic polypeptide
QVQLVQSGAEVKKPGASVMVSCKASGYTFTNYDINWVRQATGQGLEWMGWMHPNSGNTGYAQKFQGRVTMTRNTSISTAYMELSSLRSEDTAVYYCAYSSGWYRFDYWGQGTLVTVSS

SEQ ID NO: 30515 - DNA, 363 bp, synthetic construct
  misc_feature 1..363: note = Description of Artificial Sequence: Synthetic polynucleotide
  source 1..363: mol_type = other DNA
gaggtgcagttgttggagtctgggggaggctcggtacagcctggggggtccctgagactctcctgtgcagcctctggattcacctttagcagctatgccatgagctgggtccgccaggctccagggaaggggctggagtgggtctcatttattagtggtagtggtggtaacacattctacgcagactccgtgaagggccggttcaccatctccagagacaattccaagaacacgctgtatctgcaaatgaacagcctgcaagccgaggacacggccgtatattactgtacgaaaagggatacctacaacggttgggatgcttttgatatctggggccaagggacaatggtcaccgtctcttca

SEQ ID NO: 30516 - protein, 121 aa, synthetic construct
  REGION 1..121: note = Description of Artificial Sequence: Synthetic polypeptide
EVQLLESGGGSVQPGGSLRLSCAASGFTFSSYAMSWVRQAPGKGLEWVSFISGSGGNTFYADSVKGRFTISRDNSKNTLYLQMNSLQAEDTAVYYCTKRDTYNGWDAFDIWGQGTMVTVSS

SEQ ID NO: 30517 - DNA, 363 bp, synthetic construct
  misc_feature 1..363: note = Description of Artificial Sequence: Synthetic polynucleotide
  source 1..363: mol_type = other DNA
caggtgcagctggtggagtctgggggaggcgtggtccagcctgggaggtccctgagactctcctgtgcagcgtctggattcaccttcagtagctatggcatgcactgggtccgccaggctccaggcaaggggctagagtgggtggcaattatatggtatgatggaagtaataaatactatgcagactccgtgaagggccgattcaccatctccagagacaattccaagaacacgctgtatctgcaaatgaacagcctgagagccgaggacacggctgtgtattactgtgcgagagaggcctacgatttttggagtggtttctttgactcctggggccagggaaccctggtcaccgtctcctca

SEQ ID NO: 30518 - protein, 121 aa, synthetic construct
  REGION 1..121: note = Description of Artificial Sequence: Synthetic polypeptide
QVQLVESGGGVVQPGRSLRLSCAASGFTFSSYGMHWVRQAPGKGLEWVAIIWYDGSNKYYADSVKGRFTISRDNSKNTLYLQMNSLRAEDTAVYYCAREAYDFWSGFFDSWGQGTLVTVSS

SEQ ID NO: 30519 - DNA, 363 bp, synthetic construct
  misc_feature 1..363: note = Description of Artificial Sequence: Synthetic polynucleotide
  source 1..363: mol_type = other DNA
caggtgcagctggtggagtcggggggaggcgtggtccagcctgggaggtccctgagactctcctgtgcagcgtctggattcaccttcagtagctatggcatacactgggtccgccaggctccaggcaagggactggagtgggtggcacttatattttatgatggaagtaataaatactatgcagactccgtgaagggccgattcaccatctccagagacaattccaagaacacgctgtatctgcatatgagcagcctgagagccgaggacacggctgtgtattactgtgcgagacggtatagcagcagctggtccggtggtatggacgtctggggccaagggaccacggtcaccgtctcctca

SEQ ID NO: 30520 - protein, 121 aa, synthetic construct
  REGION 1..121: note = Description of Artificial Sequence: Synthetic polypeptide
QVQLVESGGGVVQPGRSLRLSCAASGFTFSSYGIHWVRQAPGKGLEWVALIFYDGSNKYYADSVKGRFTISRDNSKNTLYLHMSSLRAEDTAVYYCARRYSSSWSGGMDVWGQGTTVTVSS

SEQ ID NO: 30521 - DNA, 366 bp, synthetic construct
  misc_feature 1..366: note = Description of Artificial Sequence: Synthetic polynucleotide
  source 1..366: mol_type = other DNA
caggtgcagctggtggagtctgggggaggcgtggtccagcctgggaggtccctgagactctcctgtgcagcgtctggattcaccttcagtagctatggcatgcactgggtccgccaggctccaggcaaggggctggagtgggtggcaattatatggtatgatggaactaacaaatactatgcagactccgtgaagggccgattcaccatctccagagacaattccaagaacacgctgtatctgcaactgaacagcctgagagccgaggacacggctgtgtattactgtgcgcgagatcccttacgtggatacaatgacccggttatggactactggggccagggaaccctggtcaccgtctcctca

SEQ ID NO: 30522 - protein, 122 aa, synthetic construct; identical to SEQ ID NO: 30484
  REGION 1..122: note = Description of Artificial Sequence: Synthetic polypeptide

SEQ ID NO: 30523 - DNA, 354 bp, synthetic construct
  misc_feature 1..354: note = Description of Artificial Sequence: Synthetic polynucleotide
  source 1..354: mol_type = other DNA
caggtgcagctggtgcagtctggggctgaggtgaagaagcctggggcctcagtgaaggtctcctgcaaggcttctggatacaccttcaccaattatgatatcaactgggtgcgacaggccactggacaagggcttgagtggatgggatggatgcaccctaacagtggtaacacaggctatgcacagaagttccagggcagagtcaccatgaccaggaacacctccataagcacagcctacatggagctgagcagcctgagatctgaggacacggccgtgtattactgtgcggttagcagtggctggtactggttcgacccctggggccagggaaccctggtcaccgtctcctca

SEQ ID NO: 30524 - protein, 118 aa, synthetic construct
  REGION 1..118: note = Description of Artificial Sequence: Synthetic polypeptide
QVQLVQSGAEVKKPGASVKVSCKASGYTFTNYDINWVRQATGQGLEWMGWMHPNSGNTGYAQKFQGRVTMTRNTSISTAYMELSSLRSEDTAVYYCAVSSGWYWFDPWGQGTLVTVSS

SEQ ID NO: 30525 - DNA, 354 bp, synthetic construct; identical to SEQ ID NO: 30501
  misc_feature 1..354: note = Description of Artificial Sequence: Synthetic polynucleotide
  source 1..354: mol_type = other DNA

SEQ ID NO: 30526 - protein, 118 aa, synthetic construct; identical to SEQ ID NO: 30502
  REGION 1..118: note = Description of Artificial Sequence: Synthetic polypeptide

SEQ ID NO: 30527 - DNA, 369 bp, synthetic construct; identical to SEQ ID NO: 30471
  misc_feature 1..369: note = Description of Artificial Sequence: Synthetic polynucleotide
  source 1..369: mol_type = other DNA

SEQ ID NO: 30528 - protein, 123 aa, synthetic construct; identical to SEQ ID NO: 30472
  REGION 1..123: note = Description of Artificial Sequence: Synthetic polypeptide

SEQ ID NO: 30529 - DNA, 366 bp, synthetic construct
  misc_feature 1..366: note = Description of Artificial Sequence: Synthetic polynucleotide
  source 1..366: mol_type = other DNA
caggtgcaactggtggagtctgggggaggcgtggtccagcctggggggtccctgagactctcctgtgcagcgtctggcttcaccttcagtacctatggcatgcactgggtccgccaggctccaggcaaggggctggagtgggtggcagttatatggtatgatggaagtaataaatactatgcagactccgtgaagggccgattcaccatatccagagacaattccaagaacacgctgtatgtgcaaatgaacagcctgagagccgaggacacggctgtgtattactgtgcgagagatcccttacgtggatacaatgacccggttatggactactggggccagggaaccctggtcaccgtctcctca

SEQ ID NO: 30530 - protein, 122 aa, synthetic construct
  REGION 1..122: note = Description of Artificial Sequence: Synthetic polypeptide
QVQLVESGGGVVQPGGSLRLSCAASGFTFSTYGMHWVRQAPGKGLEWVAVIWYDGSNKYYADSVKGRFTISRDNSKNTLYVQMNSLRAEDTAVYYCARDPLRGYNDPVMDYWGQGTLVTVSS

SEQ ID NO: 30531 - DNA, 366 bp, synthetic construct
  misc_feature 1..366: note = Description of Artificial Sequence: Synthetic polynucleotide
  source 1..366: mol_type = other DNA
caggtacaggtggtgcagtctggggctgaggtgaagaagcctggggcctcagtgaaggtctcctgcaaggcttctggatacaccttcaccggctactttatgcactgggtgcgacaggcccctggacaagggcttgaatggatgggatggatcaagcctaaaagtggtggcacaaactgtgcacagaggtttcagggcagggtcaccatgaccagggacacgtccatcaccacagcctacatggaactgagcaggctgcgatctgacgacacggccgtgtattattgtgtgagaggggggactacggtgactacgtggggggtctttgactactggggccagggaaccatggtcaccgtctcctca

SEQ ID NO: 30532 - protein, 122 aa, synthetic construct
  REGION 1..122: note = Description of Artificial Sequence: Synthetic polypeptide
QVQVVQSGAEVKKPGASVKVSCKASGYTFTGYFMHWVRQAPGQGLEWMGWIKPKSGGTNCAQRFQGRVTMTRDTSITTAYMELSRLRSDDTAVYYCVRGGTTVTTWGVFDYWGQGTMVTVSS

SEQ ID NO: 30533 - DNA, 345 bp, synthetic construct
  misc_feature 1..345: note = Description of Artificial Sequence: Synthetic polynucleotide
  source 1..345: mol_type = other DNA
gaggtgcagctgttggagtctgggggaggcttggtgcagcctggggggtccctgagactctcctgtgcagcctctgcattcacctttagcagctatgtcatgagctgggtccgccaggctccagggaaggggctggagtgggtctctgctattagtggtagtggtgatagaacatactacgcagactccgtgaagggccggttcaccatctccagagacgattccaataccacgctgtatctgcaaatgaacagcctgagagccgaggacacggccgtatattactgtgcgagaacagcgggctttgactactggggccagggaaccctggtcaccgtctcctca

SEQ ID NO: 30534 - protein, 115 aa, synthetic construct
  REGION 1..115: note = Description of Artificial Sequence: Synthetic polypeptide
EVQLLESGGGLVQPGGSLRLSCAASAFTFSSYVMSWVRQAPGKGLEWVSAISGSGDRTYYADSVKGRFTISRDDSNTTLYLQMNSLRAEDTAVYYCARTAGFDYWGQGTLVTVSS

SEQ ID NO: 30535 - DNA, 354 bp, synthetic construct
  misc_feature 1..354: note = Description of Artificial Sequence: Synthetic polynucleotide
  source 1..354: mol_type = other DNA
gaggtgcaactgttggagtctgggggaggcttggtacagcctggggggtccctgagactctcctgtgcagcctctggattcacctttagcagctatgccatgagctgggtccgccaggctccagggaaggggctggagtgggtctcgtctattagtggtcgtggtggtagcacgttctacgcagactccgtgaagggccggttcaccgtctccagagacaattccaagaacacgctgtatctgcaaatgaacagcctgagagccgaggacacggccgtatattactgtgcgaaatcgaatagcagtggctggtttgactactggggccagggaaccctggtcaccgtctcctca

SEQ ID NO: 30536 - protein, 118 aa, synthetic construct
  REGION 1..118: note = Description of Artificial Sequence: Synthetic polypeptide
EVQLLESGGGLVQPGGSLRLSCAASGFTFSSYAMSWVRQAPGKGLEWVSSISGRGGSTFYADSVKGRFTVSRDNSKNTLYLQMNSLRAEDTAVYYCAKSNSSGWFDYWGQGTLVTVSS

SEQ ID NO: 30537 - DNA, 354 bp, synthetic construct
  misc_feature 1..354: note = Description of Artificial Sequence: Synthetic polynucleotide
  source 1..354: mol_type = other DNA
caggtgcagctggtgcagtctggggctgaggtgaagaagcctggggcctcagtgaaggtctcctgcaaggcttctggttacaccttcaccaattatgatctcaactgggtgcgacaggccactggacaagggcttgagtggatgggatggatgcaccctaacagtggtaacacaggctatgcacagaagttccagggcagagtcaccatgaccaggaacacctccataagcacagtttacatggagctgagcagcctgagatctgaggacacggccgtgtattactgtgcgtatagcagtggctggtactactttgactactggggccagggaaccctggtcaccgtctcctca

SEQ ID NO: 30538 - protein, 118 aa, synthetic construct
  REGION 1..118: note = Description of Artificial Sequence: Synthetic polypeptide
QVQLVQSGAEVKKPGASVKVSCKASGYTFTNYDLNWVRQATGQGLEWMGWMHPNSGNTGYAQKFQGRVTMTRNTSISTVYMELSSLRSEDTAVYYCAYSSGWYYFDYWGQGTLVTVSS

SEQ ID NO: 30539 - DNA, 363 bp, synthetic construct
  misc_feature 1..363: note = Description of Artificial Sequence: Synthetic polynucleotide
  source 1..363: mol_type = other DNA
gaggtgcagttgttggagtctgggggaggcttggtacagcctggggggtccctgagactctcctgtgcagcctctggattcacctttagcagctatgccatgagctgggtccgccagactccagggaaggggctggagtgggtctcaattattagtggtagtggtggtaacacatactacgcagactccgtgaagggccggttcaccatctccagagacaattccaagaacacgctgtatctgcaaatgaacagcctgagagccgaggacacggccgtatattactgtgcgaaaagggatacctggaacggttgggatgcttttgatatctggggccaagggacaatggtcaccgtctcttta

SEQ ID NO: 30540 - protein, 121 aa, synthetic construct
  REGION 1..121: note = Description of Artificial Sequence: Synthetic polypeptide
EVQLLESGGGLVQPGGSLRLSCAASGFTFSSYAMSWVRQTPGKGLEWVSIISGSGGNTYYADSVKGRFTISRDNSKNTLYLQMNSLRAEDTAVYYCAKRDTWNGWDAFDIWGQGTMVTVSL

SEQ ID NO: 30541 - DNA, 363 bp, synthetic construct
  misc_feature 1..363: note = Description of Artificial Sequence: Synthetic polynucleotide
  source 1..363: mol_type = other DNA
caggtgcagctggtggagtctgggggaggcgtggtccagcctgggaggtccctgagactctcctgtgcagcgtctggattcaccttcagtagctatggcatgcactgggtccgccaggctccaggcaaggggctggagtgggtggcaattatatggtatgatggaagttataaatactatgcagactccgtgaagggccgattcaccatctccagagacaattccaagaacacgctgtatctgcaaatgagcagcctgagagccgaggacacggctgtgtattactgtgcgagagatgcccacgatttttggagtggttactttgcctactggggccagggagccctggtcaccgtctcctca

SEQ ID NO: 30542 - protein, 121 aa, synthetic construct
  REGION 1..121: note = Description of Artificial Sequence: Synthetic polypeptide
QVQLVESGGGVVQPGRSLRLSCAASGFTFSSYGMHWVRQAPGKGLEWVAIIWYDGSYKYYADSVKGRFTISRDNSKNTLYLQMSSLRAEDTAVYYCARDAHDFWSGYFAYWGQGALVTVSS

SEQ ID NO: 30543 - DNA, 369 bp, synthetic construct
  misc_feature 1..369: note = Description of Artificial Sequence: Synthetic polynucleotide
  source 1..369: mol_type = other DNA
gaggtgcaactggtggagtctgggggaggcttggtacagcctggggggtccctgagactctcctgtgcagcctcaggattcaccttcagtggccatagtatgaactgggtccgccaggctccagggaaggggctggagtgggttgcatacattagcattagtggtagtaccataaagtacgcagactctgtgaagggccgattcatcatctccagagacaatgccagggattcactgtatctgcaaatgaacagcctgagagacgaggacacggctgtgtattactgtgcgagaagggggattactgtggttcggaatgaggacggtttggacgtctggggccaagggaccacggtcaccgtctcctca

SEQ ID NO: 30544 - protein, 123 aa, synthetic construct
  REGION 1..123: note = Description of Artificial Sequence: Synthetic polypeptide
EVQLVESGGGLVQPGGSLRLSCAASGFTFSGHSMNWVRQAPGKGLEWVAYISISGSTIKYADSVKGRFIISRDNARDSLYLQMNSLRDEDTAVYYCARRGITVVRNEDGLDVWGQGTTVTVSS

SEQ ID NO: 30545 - DNA, 366 bp, synthetic construct
  misc_feature 1..366: note = Description of Artificial Sequence: Synthetic polynucleotide
  source 1..366: mol_type = other DNA
caggtgcagctggtggagtctgggggaggcgtggtccagcctgggaggtccctgagactctcctgtgcagcgtctggattcaccttcagtacctatggcatgcactgggtccgccaggctccaggcaagggcctggagtgggtgtcaattatatggtatgatggaactaataaatactatgcagactccgtgaagggccgattcaccatctccagagacaattccaagaacacgctgtttctgcaactgaacagcctgagagccgaggacacggctgtctattactgtgcgcgagatcccttacgtggatacaatgacccggttttggactactggggccagggaaccctggtcaccgtctcctca

SEQ ID NO: 30546 - protein, 122 aa, synthetic construct
  REGION 1..122: note = Description of Artificial Sequence: Synthetic polypeptide
QVQLVESGGGVVQPGRSLRLSCAASGFTFSTYGMHWVRQAPGKGLEWVSIIWYDGTNKYYADSVKGRFTISRDNSKNTLFLQLNSLRAEDTAVYYCARDPLRGYNDPVLDYWGQGTLVTVSS

SEQ ID NO: 30547 - DNA, 369 bp, synthetic construct
  misc_feature 1..369: note = Description of Artificial Sequence: Synthetic polynucleotide
  source 1..369: mol_type = other DNA
caggtgcagctggtggagtctgggggaggcgtggtccagcctgggaggtccctgagactctcctgtgcagcgtctggattcaccttcagtgactatgtcatgcactgggtccgccaggctccaggcaaggggctggagtgggtggcagttatatggtatgatggaagtaataaatactatgccgactccgtgaagggccgattcaccatctccagagacaattccaagaacacgctgtatctgcaaatgaacagcctgagagccgaggacacggctgtatattactgtgcgagagaaaagtatagcagcaactggtacgactacggtatggacgtctggggccaagggaccacggtcaccgtctcctca

SEQ ID NO: 30548 - protein, 123 aa, synthetic construct
  REGION 1..123: note = Description of Artificial Sequence: Synthetic polypeptide
QVQLVESGGGVVQPGRSLRLSCAASGFTFSDYVMHWVRQAPGKGLEWVAVIWYDGSNKYYADSVKGRFTISRDNSKNTLYLQMNSLRAEDTAVYYCAREKYSSNWYDYGMDVWGQGTTVTVSS

SEQ ID NO: 30549 - DNA, 345 bp, synthetic construct
  misc_feature 1..345: note = Description of Artificial Sequence: Synthetic polynucleotide
  source 1..345: mol_type = other DNA
gaggtgcagttgttggagtctgggggaggcttggtacagcctggggggtccctgagactctcctgtgcagcctctggattcacctttagcagctatgtcatgaactgggtccgccaggctccagggaaggggctggagtgggtctcaggtatgagcggtagtggtggtagaacatactacgcagactccgtgaaggaccggttcaccatctccagagacaattccaagaacacgctgtctctgcaaatgaacagcctgagggccgaggacacggccgtatattactgtgcgagagtgactttctttgactattggggccagggaaccctggtcaccgtctcctca

SEQ ID NO: 30550 - protein, 115 aa, synthetic construct
  REGION 1..115: note = Description of Artificial Sequence: Synthetic polypeptide
EVQLLESGGGLVQPGGSLRLSCAASGFTFSSYVMNWVRQAPGKGLEWVSGMSGSGGRTYYADSVKDRFTISRDNSKNTLSLQMNSLRAEDTAVYYCARVTFFDYWGQGTLVTVSS

SEQ ID NO: 30551 - DNA, 369 bp, synthetic construct
  misc_feature 1..369: note = Description of Artificial Sequence: Synthetic polynucleotide
  source 1..369: mol_type = other DNA
caggtgcagctggtggagtctgggggaggcgtggtccagcctgggaggtccctgagactctcctgtgcagcgtctggattcaccttcagtgattatgtcatgcactgggtccgccaggctccaggcaaggggctggagtgggtggcagttatatggtatgatggaagtaataaatactatgcagactccgtgaagggccgattcatagtctccagagacaattccaagaacacgctgtatctgcaaatgaacagcctgagagccgaggacacggctgtgtattactgtgcgagagaaaagtatagcagcagctggtacgactacggtttggacgtctggggccaagggaccacggtcaccgtctcctca

SEQ ID NO: 30552 - protein, 123 aa, synthetic construct
  REGION 1..123: note = Description of Artificial Sequence: Synthetic polypeptide
QVQLVESGGGVVQPGRSLRLSCAASGFTFSDYVMHWVRQAPGKGLEWVAVIWYDGSNKYYADSVKGRFIVSRDNSKNTLYLQMNSLRAEDTAVYYCAREKYSSSWYDYGLDVWGQGTTVTVSS

SEQ ID NO: 30553 - DNA, 369 bp, synthetic construct
  misc_feature 1..369: note = Description of Artificial Sequence: Synthetic polynucleotide
  source 1..369: mol_type = other DNA
gaggtgcagctgttggagtctgggggaggcttggtacagccgggggggtcccggagactctcctgtgaagcctctggattcacctttagcagttatgccatgagctgggtccgccaggctccagggaaggggctggagtgggtctcagttattagtggtagtggtagtaacacatactacgtagactccgtgaagggccggttcaccatctccagagacaattccaagaacacgctgaatctgcaaatgaacagcctgagagccgaggactcggccgtatattactgtacgaaaggttactatgatagtagtggttattactacccttttgacttctggggccagggaaccctggtcaccgtctcctca

SEQ ID NO: 30554 - protein, 123 aa, synthetic construct
  REGION 1..123: note = Description of Artificial Sequence: Synthetic polypeptide
EVQLLESGGGLVQPGGSRRLSCEASGFTFSSYAMSWVRQAPGKGLEWVSVISGSGSNTYYVDSVKGRFTISRDNSKNTLNLQMNSLRAEDSAVYYCTKGYYDSSGYYYPFDFWGQGTLVTVSS

SEQ ID NO: 30555 - DNA, 363 bp, synthetic construct
  misc_feature 1..363: note = Description of Artificial Sequence: Synthetic polynucleotide
  source 1..363: mol_type = other DNA
caggtgcaactggtggagtctgggggaggcgtggtccagcctgggaggtccctgagactcacctgtgcagcgtctggattcaccttcagtagctatggcatgcactgggtccgccaggctccaggcaaggggctggagtgggtggcaattatatggtatgatggaagttataaatactatacagactccgtgaagggccgattcaccatctccagagacaattccaagaacacgctgtatctgcaaatgaacagcctgagagccgaggacacggctgtgtattactgtgcgagagagacttacgatttttggagtggttattttgtcttctggggccagggaaccctggtcaccgtctcctca

SEQ ID NO: 30556 - protein, 121 aa, synthetic construct
  REGION 1..121: note = Description of Artificial Sequence: Synthetic polypeptide
QVQLVESGGGVVQPGRSLRLTCAASGFTFSSYGMHWVRQAPGKGLEWVAIIWYDGSYKYYTDSVKGRFTISRDNSKNTLYLQMNSLRAEDTAVYYCARETYDFWSGYFVFWGQGTLVTVSS

SEQ ID NO: 30557 - DNA, 354 bp, synthetic construct
  misc_feature 1..354: note = Description of Artificial Sequence: Synthetic polynucleotide
  source 1..354: mol_type = other DNA
caggtgcagctggtgcagtctggggctgaggtgaagaagcctggggcctcagtgaaggtctcctgcaaggcttctggatacaccttcaccaattatgatatcaactgggtgcgacaggccactggacaagggcttgagtggatgggatggatgcaccctaacagtggtaacacaggctatgcacagaagttccagggcagagtcaccatgaccaggaacacctccataagcacagcctacatggagctgagcagcctgagatctgaggacacggccgtgtattactgtgcgtatagcagtggctggtactactttgacttctggggccagggaaccctggtcaccgtctcctca

SEQ ID NO: 30558 - protein, 118 aa, synthetic construct
  REGION 1..118: note = Description of Artificial Sequence: Synthetic polypeptide
QVQLVQSGAEVKKPGASVKVSCKASGYTFTNYDINWVRQATGQGLEWMGWMHPNSGNTGYAQKFQGRVTMTRNTSISTAYMELSSLRSEDTAVYYCAYSSGWYYFDFWGQGTLVTVSS

SEQ ID NO: 30559 - DNA, 351 bp, synthetic construct
  misc_feature 1..351: note = Description of Artificial Sequence: Synthetic polynucleotide
  source 1..351: mol_type = other DNA
gaggtgcacctgttggagtctgggggaggcttggtacagactggggggtccctgagactctcctgtgcagcctctggattcacctttagcagctatgccatgacctgggtccgccaggctccagggaaggggctggagtgggtctcagttattagtggtagtggtggtaatacattctacgcagactccgtgaagggccggttcaccatctccagagacaattccaagaatacgctgtatctgcaaatgaacagcctgagagccgaggacacggccgtatattactgtgcgcgccgggacggtgactactttgactactggggccagggaaccctggtcaccgtctcctca

SEQ ID NO: 30560 - protein, 117 aa, synthetic construct
  REGION 1..117: note = Description of Artificial Sequence: Synthetic polypeptide
EVHLLESGGGLVQTGGSLRLSCAASGFTFSSYAMTWVRQAPGKGLEWVSVISGSGGNTFYADSVKGRFTISRDNSKNTLYLQMNSLRAEDTAVYYCARRDGDYFDYWGQGTLVTVSS

SEQ ID NO: 30561 - DNA, 351 bp, synthetic construct
  misc_feature 1..351: note = Description of Artificial Sequence: Synthetic polynucleotide
  source 1..351: mol_type = other DNA
gaggtgcacctgttggagtctgggggaggcttggtacagactggggggtccctgagactctcctgtgcagcctctggattcacctttagcagctatgccatgacctgggtccgccaggctccagggaaggggctggagtgggtctcagttattagtggtagtggtggtaacacattctacgcagactccgtgaagggccggttcaccatctccagagacaattccaagaacacgctgtatctgcaaatgaacagcctgagagccgaggacacggccgtatattactgtgcgcgccggtacggtgactactttgactactggggccagggaaccctggtcaccgtctcctca

SEQ ID NO: 30562 - protein, 117 aa, synthetic construct
  REGION 1..117: note = Description of Artificial Sequence: Synthetic polypeptide
EVHLLESGGGLVQTGGSLRLSCAASGFTFSSYAMTWVRQAPGKGLEWVSVISGSGGNTFYADSVKGRFTISRDNSKNTLYLQMNSLRAEDTAVYYCARRYGDYFDYWGQGTLVTVSS

SEQ ID NO: 30563 - DNA, 366 bp, synthetic construct
  misc_feature 1..366: note = Description of Artificial Sequence: Synthetic polynucleotide
  source 1..366: mol_type = other DNA
caggtgcagctggtggagtcggggggaggcgtggtccagcctgggaggtccctgagactctcctgtgtagcgtctggattcacctccagtacctatggcatgcactgggtccgccaggctccaggcaaggggctggaatggatggcaattatatggtatgatggaactaataaatactatgcagactccgtgaagggccgattcaccatctccagagacaattccaagaacacgctgtatctgcaactgaacagcctgagagccgaggacacggctgtgtattactgtgcgcgagatcccttacgtggatacaatgacccggttatggactactggggccagggaaccctggtcaccgtctcctca

SEQ ID NO: 30564 - protein, 122 aa, synthetic construct
  REGION 1..122: note = Description of Artificial Sequence: Synthetic polypeptide
QVQLVESGGGVVQPGRSLRLSCVASGFTSSTYGMHWVRQAPGKGLEWMAIIWYDGTNKYYADSVKGRFTISRDNSKNTLYLQLNSLRAEDTAVYYCARDPLRGYNDPVMDYWGQGTLVTVSS

SEQ ID NO: 30565 - DNA, 363 bp, synthetic construct
  misc_feature 1..363: note = Description of Artificial Sequence: Synthetic polynucleotide
  source 1..363: mol_type = other DNA
caggtgcagctggtggagtctgggggaggcgtggtccagcctgggaggtccctgagactctcctgtgcagcgtctggattcaccttcagtacctatggcatgcactgggtccgccaggctccaggcaaggggctggagtgggtggcagttatatggtatgatggaagtaataaatactacgcagactccgtgaagggccgattcaccatctccagagacaatttcaagaacacgctgtatctgcaaatgaacagcctgagagccgaggacacggctgtttattactgtgcgagagaacggtacgatttttggagtggtcattttgactactggggccagggaaccctggtcaccgtctcctca

SEQ ID NO: 30566 - protein, 121 aa, synthetic construct
  REGION 1..121: note = Description of Artificial Sequence: Synthetic polypeptide
QVQLVESGGGVVQPGRSLRLSCAASGFTFSTYGMHWVRQAPGKGLEWVAVIWYDGSNKYYADSVKGRFTISRDNFKNTLYLQMNSLRAEDTAVYYCARERYDFWSGHFDYWGQGTLVTVSS

SEQ ID NO: 30567 - DNA, 351 bp, synthetic construct
  misc_feature 1..351: note = Description of Artificial Sequence: Synthetic polynucleotide
  source 1..351: mol_type = other DNA
gaggtgcacctgttggagtcggggggaggcttggtacagactggggggtccctgagactctcctgtgcagcctctggattcacctttagcagctatgccatgacctgggtccgccaggctccagggaaggggctggagtgggtctcagttattagtggttttggtggtaacacattctacgcagactccgtgaagggccggttcaccatctccagagacaattccaagaacacgctgtatctgcaaatgaacagcctgagagccgaggacacggccgtatattactgtgcgcgccggtacggtgactactttgactactggggccagggaaccctggtcaccgtctcctca

SEQ ID NO: 30568 - protein, 117 aa, synthetic construct
  REGION 1..117: note = Description of Artificial Sequence: Synthetic polypeptide
EVHLLESGGGLVQTGGSLRLSCAASGFTFSSYAMTWVRQAPGKGLEWVSVISGFGGNTFYADSVKGRFTISRDNSKNTLYLQMNSLRAEDTAVYYCARRYGDYFDYWGQGTLVTVSS

SEQ ID NO: 30569 - DNA, 363 bp, synthetic construct
  misc_feature 1..363: note = Description of Artificial Sequence: Synthetic polynucleotide
  source 1..363: mol_type = other DNA
caggtgcagctggtggagtcggggggaggcgtggtccagcctgggaggtccctgagactctcctgtgcagcgtctggattcaccttcagtagctatggcatgcactgggtccgccaggctccaggcaaggggctggagtgggtggcacttatattttatgatggaagtaataaatactatgcagactccgtgaagggccgattcaccatctccagagacaattccaagaacacgctgtttctgcaaatgaacagcctgagagccgaggacacggctgtgtattactgtgcgagacggtatagcggcagctggtccggtggtatggacgtctggggccaagggaccacggtcaccgtctcctca

SEQ ID NO: 30570 - protein, 121 aa, synthetic construct
  REGION 1..121: note = Description of Artificial Sequence: Synthetic polypeptide
QVQLVESGGGVVQPGRSLRLSCAASGFTFSSYGMHWVRQAPGKGLEWVALIFYDGSNKYYADSVKGRFTISRDNSKNTLFLQMNSLRAEDTAVYYCARRYSGSWSGGMDVWGQGTTVTVSS

SEQ ID NO: 30571 - DNA, 354 bp, synthetic construct
  misc_feature 1..354: note = Description of Artificial Sequence: Synthetic polynucleotide
  source 1..354: mol_type = other DNA
gaggtgcagctgttggagtctgggggaggcttggaacagcctggggggtccctgagactctcctgtgcagcctctggattcacctttagcagctttgccatgaactgggtccgccaggctccagggaaggggctggagtgggtctcagttattagcggtcgcggtggtaacacattctacgcagactccgtgaagggccggttcaccatctccagagacaattccaagaacacgctgtttctgcaaatgaacagcctgagagccgaggacacggccgtatatttctgtgcgaaacggactggggatgatgtttttgatgtctggggccaagggacaatggtcaccgtctcttca

SEQ ID NO: 30572 - protein, 118 aa, synthetic construct
  REGION 1..118: note = Description of Artificial Sequence: Synthetic polypeptide
EVQLLESGGGLEQPGGSLRLSCAASGFTFSSFAMNWVRQAPGKGLEWVSVISGRGGNTFYADSVKGRFTISRDNSKNTLFLQMNSLRAEDTAVYFCAKRTGDDVFDVWGQGTMVTVSS

SEQ ID NO: 30573 - DNA, 369 bp, synthetic construct
  misc_feature 1..369: note = Description of Artificial Sequence: Synthetic polynucleotide
  source 1..369: mol_type = other DNA
caggtgcagctggtggagtctgggggaggcgtggtccagcctgggaggtccctgagactctcctgtgcagcgtctggattcaccttcagtgcctatggcatgcactgggtccgccaggctccaggcaaggggctggagtgggtgacaattatttggtatgatggaagttataaatactatgcagactccgtgaagggccgattcgccatctccagagacaattccaagaatacgctgtatctgcaaatgaacagcctgagagccgaggacacggctgtgtattactgtgcgagaaccggtgtggatccctgggactactacaacggaatggacgtctggggccaagggaccacggtcaccgtctcctca

SEQ ID NO: 30574 - protein, 123 aa, synthetic construct
  REGION 1..123: note = Description of Artificial Sequence: Synthetic polypeptide
QVQLVESGGGVVQPGRSLRLSCAASGFTFSAYGMHWVRQAPGKGLEWVTIIWYDGSYKYYADSVKGRFAISRDNSKNTLYLQMNSLRAEDTAVYYCARTGVDPWDYYNGMDVWGQGTTVTVSS

SEQ ID NO: 30575 - DNA, 351 bp, synthetic construct
  misc_feature 1..351: note = Description of Artificial Sequence: Synthetic polynucleotide
  source 1..351: mol_type = other DNA
caggtgcagctggtggagtctgggggaggcgtggtccagcctgggaggtccctgagactctcctgtgcagcgtctggattcaccttcagtgactatggcatgcactgggtccgccaggctccaggcaagggactggagtgggtggcagttatatggtatgatgaaaataataaacactatgcagactccgcgaagggccgattcaccatctccagagacaattccaagaacacgctgtatctgcaaatgaacagcctgagagtcgaagacacggctgtgtattactgtgcgagagaggttggctggtccgatgactactggggccagggaaccctggtcaccgtctcctca

SEQ ID NO: 30576 - protein, 117 aa, synthetic construct
  REGION 1..117: note = Description of Artificial Sequence: Synthetic polypeptide
QVQLVESGGGVVQPGRSLRLSCAASGFTFSDYGMHWVRQAPGKGLEWVAVIWYDENNKHYADSAKGRFTISRDNSKNTLYLQMNSLRVEDTAVYYCAREVGWSDDYWGQGTLVTVSS

SEQ ID NO: 30577 - DNA, 357 bp, synthetic construct
  misc_feature 1..357: note = Description of Artificial Sequence: Synthetic polynucleotide
  source 1..357: mol_type = other DNA
caggtgcagctggtggagtctgggggaggcgtggtccagcctgggaggtccctgagactctcctgtgcagcgtctggattcaccttcagtagctatggcatgcactgggtccgccaggctccaggcaaggggctggagtgggtgtcagttatatggtatgatggaagtgataaatactatgaagactccgtgaagggccgattcaccatctccagagacaattccaagaacacgctgtatctgcaaatgaacagcctgagagccgaggacacggctgtgtattactgtgcgagagatcatccccggtggagctacggagactactggggccagggaaccctggtcaccgtgtcctca

SEQ ID NO: 30578 - protein, 119 aa, synthetic construct
  REGION 1..119: note = Description of Artificial Sequence: Synthetic polypeptide
QVQLVESGGGVVQPGRSLRLSCAASGFTFSSYGMHWVRQAPGKGLEWVSVIWYDGSDKYYEDSVKGRFTISRDNSKNTLYLQMNSLRAEDTAVYYCARDHPRWSYGDYWGQGTLVTVSS

SEQ ID NO: 30579 - DNA, 363 bp, synthetic construct
  misc_feature 1..363: note = Description of Artificial Sequence: Synthetic polynucleotide
  source 1..363: mol_type = other DNA
caggtgcagctggtggagtctgggggaggcgtggtccagcctgggaggtccctgagactctcctgtgtagcgtctggattcaccttcagtagctatggcatgcactgggtccgccaggctccaggcaaggggctggaatgggtgacaattatatggtatgatggaagttataaatactatgcagactccgtgaagggccgattcaccatctccagagacaattccaagaacacgctgtatctgcaaatgaacagcctgagagccgaggacacggctgtgtattactgtgcgagagatcattacgatttttggagtgggcactttgacttctggggccagggaaccctggtcaccgtctcctca

SEQ ID NO: 30580 - protein, 121 aa, synthetic construct
  REGION 1..121: note = Description of Artificial Sequence: Synthetic polypeptide
QVQLVESGGGVVQPGRSLRLSCVASGFTFSSYGMHWVRQAPGKGLEWVTIIWYDGSYKYYADSVKGRFTISRDNSKNTLYLQMNSLRAEDTAVYYCARDHYDFWSGHFDFWGQGTLVTVSS

SEQ ID NO: 30581 - DNA, 339 bp, synthetic construct
  misc_feature 1..339: note = Description of Artificial Sequence: Synthetic polynucleotide
  source 1..339: mol_type = other DNA
caggtgcagctggtgcagtctggggctgaagtgaagacgcctggggcctcagtgaaggtctcctgcagggcttctggatacaccttcaccagctacaatatgcactgggtgcgacaggtccctggacaagggcttgagtggatgggatggatcaaccctaacaatggtggctcaaactatacacagaagtttcagggcagggtcaccatgaccagggacacgtccatcagcacagcctacatggagctgagcaggctgagatctgacgacacggccgtgtattactgtgcgagaaagtttggggactggggccagggaaccctggtcaccgtctcctca

SEQ ID NO: 30582 - protein, 113 aa, synthetic construct
  REGION 1..113: note = Description of Artificial Sequence: Synthetic polypeptide
QVQLVQSGAEVKTPGASVKVSCRASGYTFTSYNMHWVRQVPGQGLEWMGWINPNNGGSNYTQKFQGRVTMTRDTSISTAYMELSRLRSDDTAVYYCARKFGDWGQGTLVTVSS

SEQ ID NO: 30583 - DNA, 366 bp, synthetic construct
  misc_feature 1..366: note = Description of Artificial Sequence: Synthetic polynucleotide
  source 1..366: mol_type = other DNA
gaggtgcaactgttggagtctgggggaggcttggtacagcctggggggtccctgagactctcctgtgcagcctctggattcacctttagcagctatgccatgagttgggtccgccaggctccagggaaggggctggagtgggtctcagttattagtggtagtggtggtaacacattctacggagactccgtgaagggccggttcaccatctccagagacaattccaagaacacgctgtatctgcaaatgaacagcctgagagccgaggacacggccatatattactgtgcgaaacgggagacctacgactggggatccgatgcttttgatatctggggccaagggacaatggtcaccgtctcttca

SEQ ID NO: 30584 - protein, 122 aa, synthetic construct
  REGION 1..122: note = Description of Artificial Sequence: Synthetic polypeptide
EVQLLESGGGLVQPGGSLRLSCAASGFTFSSYAMSWVRQAPGKGLEWVSVISGSGGNTFYGDSVKGRFTISRDNSKNTLYLQMNSLRAEDTAIYYCAKRETYDWGSDAFDIWGQGTMVTVSS

SEQ ID NO: 30585 - DNA, 354 bp, synthetic construct
  misc_feature 1..354: note = Description of Artificial Sequence: Synthetic polynucleotide
  source 1..354: mol_type = other DNA
caggtgcagctggtgcagtctggggctgaggtgaagaagcctggggcctcagtgaaggtctcctgcaaggcttctggatacaccttcaccaattatgatatcaactgggtgcgacaggccactggacaagggcttgagtggatgggatggatgaaccctaacagtggtaacacaggctatgcacagaagttccagggcagagtcaccatgaccaggaacacctccataagcacagcctacatggagctgagcagcctgagatctgaggacacggccgtgtattactgtgcgagtagtagtggctggtacatctttgactactggggccagggaaccctggtcaccgtctcctca

SEQ ID NO: 30586 - protein, 118 aa, synthetic construct
  REGION 1..118: note = Description of Artificial Sequence: Synthetic polypeptide
QVQLVQSGAEVKKPGASVKVSCKASGYTFTNYDINWVRQATGQGLEWMGWMNPNSGNTGYAQKFQGRVTMTRNTSISTAYMELSSLRSEDTAVYYCASSSGWYIFDYWGQGTLVTVSS

SEQ ID NO: 30587 - DNA, 351 bp, synthetic construct
  misc_feature 1..351: note = Description of Artificial Sequence: Synthetic polynucleotide
  source 1..351: mol_type = other DNA
caggtgcagctggtggagtctgggggaggcgtggtccagcctgggaggtccctgagactctcctgtgcagcgtctggattcaccttcagtgactatggcatgcactgggtccgccaggctccaggcaagggactggagtgggtggcagttatatggtatgatgaaaataataaacactatgcagactccgcgaagggccgattcaccatctccagagacaattccaagaacacgctgtatctgcaaatgaacagcctgagagccgaagacacggctgtgtattactgtgcgagagaggttggctggtccgatgactactggggccagggaaccctggtcatcgtctcctca

SEQ ID NO: 30588 - protein, 117 aa, synthetic construct
  REGION 1..117: note = Description of Artificial Sequence: Synthetic polypeptide
QVQLVESGGGVVQPGRSLRLSCAASGFTFSDYGMHWVRQAPGKGLEWVAVIWYDENNKHYADSAKGRFTISRDNSKNTLYLQMNSLRAEDTAVYYCAREVGWSDDYWGQGTLVIVSS

SEQ ID NO: 30589 - DNA, 363 bp, synthetic construct
  misc_feature 1..363: note = Description of Artificial Sequence: Synthetic polynucleotide
  source 1..363: mol_type = other DNA
caggtgcaactggtggagtctgggggaggcgtggtccagcctgggaggtccctgagactctcctgtgcagcgtctggattcaccttcagtagctatggcatgcactgggtccgccaggctccaggcaaggggctggagtggatggcaattatatggtatgatggaagttataaatactatgcagactccgtgaagggccgattcaccatctccagagacaattccaagaacacgctgtatctgcaaatgaacagcctgagagccgaggacacggctgtgtattactgtgcgagagatcattacgatttttggagtgggcactttgactactggggccagggaaccctggtcaccgtctcctca

SEQ ID NO: 30590 - protein, 121 aa, synthetic construct
  REGION 1..121: note = Description of Artificial Sequence: Synthetic polypeptide
QVQLVESGGGVVQPGRSLRLSCAASGFTFSSYGMHWVRQAPGKGLEWMAIIWYDGSYKYYADSVKGRFTISRDNSKNTLYLQMNSLRAEDTAVYYCARDHYDFWSGHFDYWGQGTLVTVSS

SEQ ID NO: 30591 - DNA, 354 bp, synthetic construct
  misc_feature 1..354: note = Description of Artificial Sequence: Synthetic polynucleotide
  source 1..354: mol_type = other DNA
gaggtgcagctgttggagtctgggggaggcttggtacagcctggggggtccctgagactctcctgtgcagcctctggattcacctttagcagctatgccatgagttgggtccgccaggctccagggaaggggctggagtgggtctcagttattagtggtagaggtggtaccacattctacgcagactccgtgaagggccggttcaccatctccagagacaattccaagaacacgctgtatctgcaaatgaacagcctgagagccgaggacacggccgtatattactgtgcgaaacggactggggatgatgtttttgatatctggggccaagggacaatggtcaccgtctcttca

SEQ ID NO: 30592 - protein, 118 aa, synthetic construct
  REGION 1..118: note = Description of Artificial Sequence: Synthetic polypeptide
EVQLLESGGGLVQPGGSLRLSCAASGFTFSSYAMSWVRQAPGKGLEWVSVISGRGGTTFYADSVKGRFTISRDNSKNTLYLQMNSLRAEDTAVYYCAKRTGDDVFDIWGQGTMVTVSS

SEQ ID NO: 30593 - DNA, 369 bp, synthetic construct
  misc_feature 1..369: note = Description of Artificial Sequence: Synthetic polynucleotide
  source 1..369: mol_type = other DNA
caggtgcagctggtggagtctgggggaggcgtggtccagcctgggaggtccctgagactctcctgtgcagcctctggattcaccttcagtagctatggcatgcactgggtccgccaggctccaggcaaggggctggagtgggtggcaattatatcatatgctggaagtactaaattctatgcagactccgtgaagggccgattcaccatctccagagacaattccaagaacacgctgtatctgcaaatgaacagcctgagagctgaggacacggctgtgtattactgtgtgagaaggcccccgcagtggctggtagagggctacggtatggacgtctggggccaagggaccacggtcaccgtctcctca

SEQ ID NO: 30594 - protein, 123 aa, synthetic construct
  REGION 1..123: note = Description of Artificial Sequence: Synthetic polypeptide
QVQLVESGGGVVQPGRSLRLSCAASGFTFSSYGMHWVRQAPGKGLEWVAIISYAGSTKFYADSVKGRFTISRDNSKNTLYLQMNSLRAEDTAVYYCVRRPPQWLVEGYGMDVWGQGTTVTVSS

SEQ ID NO: 30595 - DNA, 360 bp, synthetic construct
  misc_feature 1..360: note = Description of Artificial Sequence: Synthetic polynucleotide
  source 1..360: mol_type = other DNA
caggtgcagctggtggagtctgggggaggcgtggtccagcctgggaggtccctgagactctcctgtgcagcctctggattcaccttcagtagctatggcatgcactgggtccgccaggctccaggcaaggggctggagtgggtggcagttatatcatctgctggaagtaataaatactatgcagactccgtgaagggccgattcaccatctccagagacaattccaagaacacgctgtatctgcaaatgaacagcctgagagctgaggacacggctgtgtattattgtgcgagaaggtatagcagtggctgggactggttcgacccctggggccagggaaccctggtcaccgtctcctca

SEQ ID NO: 30596 - protein, 120 aa, synthetic construct
  REGION 1..120: note = Description of Artificial Sequence: Synthetic polypeptide
QVQLVESGGGVVQPGRSLRLSCAASGFTFSSYGMHWVRQAPGKGLEWVAVISSAGSNKYYADSVKGRFTISRDNSKNTLYLQMNSLRAEDTAVYYCARRYSSGWDWFDPWGQGTLVTVSS

SEQ ID NO: 30597 - DNA, 348 bp, synthetic construct
  misc_feature 1..348: note = Description of Artificial Sequence: Synthetic polynucleotide
  source 1..348: mol_type = other DNA
gaggtgcagctggtggagtctgggggaggcctggtcaagcctggggggtccctgagactctcctgtgcagcctctggattcaccttcagggactatagcatgaactgggtccgccaggctccagggaaggggctggagtgggtctcatctattagtagtggtagtggttacatacactacgcagactcagtgaagggccgattcaccatctccagagacaacgccaagaactcactgtatctgcaaatgaacagcctgagagccgaggacacggctgtgtattactgtgcgcgagcaactatggcccttgactactggggccagggaaccctggtcaccgtctcctca

SEQ ID NO: 30598 - protein, 116 aa, synthetic construct
  REGION 1..116: note = Description of Artificial Sequence: Synthetic polypeptide
EVQLVESGGGLVKPGGSLRLSCAASGFTFRDYSMNWVRQAPGKGLEWVSSISSGSGYIHYADSVKGRFTISRDNAKNSLYLQMNSLRAEDTAVYYCARATMALDYWGQGTLVTVSS

SEQ ID NO: 30599 - DNA, 360 bp, synthetic construct
  misc_feature 1..360: note = Description of Artificial Sequence: Synthetic polynucleotide
  source 1..360: mol_type = other DNA
caggtgcagctgcaggagtcgggcccaggactggtgaagccttcggagaccctgtccctcacctgcactgtctctggtggctccatcaataattactactggagctggatccggcagcccgccgggaagggactggagtggattgggcgtatctataccagtgggagcaccaactacaacccctccctcaagagtcgagtcaccatgtcagtagacacgtccaagaaccagttctccctgaagctgagctctgtgaccgccgcggacacggccgtgcattactgtgcgagagatcggggatactatggctactacggtatggacgtctggggccaagggaccacggtcaccgtctcctca

SEQ ID NO: 30600 - protein, 120 aa, synthetic construct
  REGION 1..120: note = Description of Artificial Sequence: Synthetic polypeptide
QVQLQESGPGLVKPSETLSLTCTVSGGSINNYYWSWIRQPAGKGLEWIGRIYTSGSTNYNPSLKSRVTMSVDTSKNQFSLKLSSVTAADTAVHYCARDRGYYGYYGMDVWGQGTTVTVSS

SEQ ID NO: 30601 - DNA, 360 bp, synthetic construct
  misc_feature 1..360: note = Description of Artificial Sequence: Synthetic polynucleotide
  source 1..360: mol_type = other DNA
caggtgcagctggtggagtctgggggaggcgtggtccagcctgggaggtccctgagactctcctgtgcagcgtctggattcaccttcagtagctatggcatgcactgggtccgccaggctccaggcaaggggctggagtgggtggcagttatatggtatgatggaagtaataaaaactatgcagactccgtgaagggccgattcaccatctccagagacaattccaagaacacgctgtatctgcaaatgaacagcctgagagccgaggacacggctgtgtattactgtgcgagagatcagggcgtgggctacgacggtttggacgtctggggccaagggaccacggtcaccgtctcctca

SEQ ID NO: 30602 - protein, 120 aa, synthetic construct
  REGION 1..120: note = Description of Artificial Sequence: Synthetic polypeptide
QVQLVESGGGVVQPGRSLRLSCAASGFTFSSYGMHWVRQAPGKGLEWVAVIWYDGSNKNYADSVKGRFTISRDNSKNTLYLQMNSLRAEDTAVYYCARDQGVGYDGLDVWGQGTTVTVSS

SEQ ID NO: 30603 - DNA, 360 bp, synthetic construct
  misc_feature 1..360: note = Description of Artificial Sequence: Synthetic polynucleotide
  source 1..360: mol_type = other DNA
caggtgcagctggtggagtctgggggaggcgtggtccagcctgggaggtccctgagactctcctgtacagcgtctggattcaccttcagtaactatggcatgcactgggtccgccaggctccaggcaaggggctggagtgggtggcaattatatggtttgatggaagtaataaatactatgcagactccgtgaagggccgattcaccatctccagagacaattccaataacacgctgtatctgcaaatgaacagcctgcgagccgaggacacggctgtgtattactgtgcgaaagcccagggggtctactactacgttatggacgtctggggccaagggaccacggtcaccgtctcctca

SEQ ID NO: 30604 - protein, 120 aa, synthetic construct
  REGION 1..120: note = Description of Artificial Sequence: Synthetic polypeptide
QVQLVESGGGVVQPGRSLRLSCTASGFTFSNYGMHWVRQAPGKGLEWVAIIWFDGSNKYYADSVKGRFTISRDNSNNTLYLQMNSLRAEDTAVYYCAKAQGVYYYVMDVWGQGTTVTVSS

SEQ ID NO: 30605 - DNA, 369 bp, synthetic construct
  misc_feature 1..369: note = Description of Artificial Sequence: Synthetic polynucleotide
  source 1..369: mol_type = other DNA
gaggtgcagctgttggactctgggggaggcttgggacagcctggggggtccctgagactctcctgtgcagcctctggattcacctttgacagctatgccatgaactgggtccgccaggctccagggaaggggctggagtgggtctcaactattagtggtactggtcgtaggacatactacgcagactccgtgaagggccggttcaccatctccagagacaattccaagaacacgctgtatctgcaaatgaatagcctgagagccgaggacacggccgtatattactgtgcgaaagaggaggattactatgatagtagtggcccggggttcgacccctggggccagggaaccctggtcaccgtctcctca

SEQ ID NO: 30606 - protein, 123 aa, synthetic construct
  REGION 1..123: note = Description of Artificial Sequence: Synthetic polypeptide
EVQLLDSGGGLGQPGGSLRLSCAASGFTFDSYAMNWVRQAPGKGLEWVSTISGTGRRTYYADSVKGRFTISRDNSKNTLYLQMNSLRAEDTAVYYCAKEEDYYDSSGPGFDPWGQGTLVTVSS

SEQ ID NO: 30607 - DNA, 360 bp, synthetic construct
  misc_feature 1..360: note = Description of Artificial Sequence: Synthetic polynucleotide
  source 1..360: mol_type = other DNA
caggtgcagctggtggagtctgggggaggcgtggtccagcctgggaggtccctgagactctcctgtgcagcgtctggattcaccttcagtatttatggcatgcactgggtccgccaggctccaggcaaggggctggagtgggtggcagttatatggtatgatggaagtaataaaaactatgcagactccgtgaagggccgattcaccatctccagagacaattccaagaacacgctgtatctgcaaatgaacagcctgagagccgaggacacggctgtgtattactgtgcgagagatcagggcgtgggctacgacggtttggacgtctggggccaagggaccacggtcaccgtctcctca

SEQ ID NO: 30608 - protein, 120 aa, synthetic construct
  REGION 1..120: note = Description of Artificial Sequence: Synthetic polypeptide
QVQLVESGGGVVQPGRSLRLSCAASGFTFSIYGMHWVRQAPGKGLEWVAVIWYDGSNKNYADSVKGRFTISRDNSKNTLYLQMNSLRAEDTAVYYCARDQGVGYDGLDVWGQGTTVTVSS

SEQ ID NO: 30609 - DNA, 360 bp, synthetic construct
  misc_feature 1..360: note = Description of Artificial Sequence: Synthetic polynucleotide
  source 1..360: mol_type = other DNA
cagctgcagctgcaggagtcgggcccaggactggtgaagccttcggagaccctgtccctcacctgcactgtctctggtggctccatcagaagctaccactggagctggatccggcagcccgccgggaagggactggagtggattgggcttatctataccagtaggagcaccatttacaacccctccctcaagagtcgagtcaccctgtcagtagacacgtccaagaaccagttctccctgaagctgagctctgtgaccgccgcggacacggccgtgtattactgtgcgagactccggtataactggaacttcccttactttgactactggggccagggaaccctggtcaccgtctcctca

SEQ ID NO: 30610 - protein, 120 aa, synthetic construct
  REGION 1..120: note = Description of Artificial Sequence: Synthetic polypeptide
QLQLQESGPGLVKPSETLSLTCTVSGGSIRSYHWSWIRQPAGKGLEWIGLIYTSRSTIYNPSLKSRVTLSVDTSKNQFSLKLSSVTAADTAVYYCARLRYNWNFPYFDYWGQGTLVTVSS

SEQ ID NO: 30611 - DNA, 363 bp, synthetic construct
  misc_feature 1..363: note = Description of Artificial Sequence: Synthetic polynucleotide
  source 1..363: mol_type = other DNA
caggtgcagctgcaggagtcgggcccaggactggtgaagccttcacagaccctgtccctcacctgcactgtctctggtggctccatcagcagtggtggttactactggaactggatccgccagcacccagggaagggcctggagtggattgggtatatctattacagtgggagcacctactacaacccgtccctcaagagtcgagttaccatatcagtagacacgtctaagaaccagttttttctgaagctgaactctgtgactgccgcggacacggccgtgtattactgtgcgagatccgggtataattgggacgccggggtcgacccctggggccggggaaccctggtcaccgtctcctca

SEQ ID NO: 30612 - protein, 121 aa, synthetic construct
  REGION 1..121: note = Description of Artificial Sequence: Synthetic polypeptide
QVQLQESGPGLVKPSQTLSLTCTVSGGSISSGGYYWNWIRQHPGKGLEWIGYIYYSGSTYYNPSLKSRVTISVDTSKNQFFLKLNSVTAADTAVYYCARSGYNWDAGVDPWGRGTLVTVSS

SEQ ID NO: 30613 - DNA, 360 bp, synthetic construct
  misc_feature 1..360: note = Description of Artificial Sequence: Synthetic polynucleotide
  source 1..360: mol_type = other DNA
caggtgcagctggtggagtctgggggagccgtggtccagcctgggaggtccctgagactctcctgtgcagcctctggattcaccttcagtagctatggcatgcactgggtccgccaggctccaggcaaggggctggagtgggtggcagttatatcatatgatggaggttataaaaactatgtagactccgtgaagggccgattcaccatctccagagacaattccaagaacacgctgtatctgcaaatgaatagcctgagagctgaggacacggctgtgtattactgtgcgagaggtacccacgggtactactacggtgtggacgtctggggccaagggaccacggtcaccgtctcctca

SEQ ID NO: 30614 - protein, 120 aa, synthetic construct
  REGION 1..120: note = Description of Artificial Sequence: Synthetic polypeptide
QVQLVESGGAVVQPGRSLRLSCAASGFTFSSYGMHWVRQAPGKGLEWVAVISYDGGYKNYVDSVKGRFTISRDNSKNTLYLQMNSLRAEDTAVYYCARGTHGYYYGVDVWGQGTTVTVSS

SEQ ID NO: 30615 - DNA, 363 bp, synthetic construct
  misc_feature 1..363: note = Description of Artificial Sequence: Synthetic polynucleotide
  source 1..363: mol_type = other DNA
gaggtgcagctgttggagtctgggggaggcttggtacagcctggggggtccctgagactctcctgtgcagcctctggattcacctttagcagctatgccatgagctgggtccgccaggctccagggaaggggctggagtgggactcagctattattggtaatggtggtaggacatactacgcagactccgtgaagggccggttcaccatctccagagacaattccaagaacacgctgtatctgcaaatgaacagcctgagagccgaggacacggccgtatattactgtgcgaaagatatgggtagatacagctatggtttctttgactactggggccagggaaccctggtcaccgtctcctca

SEQ ID NO: 30616 - protein, 121 aa, synthetic construct
  REGION 1..121: note = Description of Artificial Sequence: Synthetic polypeptide
EVQLLESGGGLVQPGGSLRLSCAASGFTFSSYAMSWVRQAPGKGLEWDSAIIGNGGRTYYADSVKGRFTISRDNSKNTLYLQMNSLRAEDTAVYYCAKDMGRYSYGFFDYWGQGTLVTVSS

SEQ ID NO: 30617 - DNA, 360 bp, synthetic construct
  misc_feature 1..360: note = Description of Artificial Sequence: Synthetic polynucleotide
  source 1..360: mol_type = other DNA
caggtgcagctggtggagtctgggggaggcgtggtccagcctgggaggtccctgagactctcctgtgcagcgtctggattcaccttcaggaactatggcatgcactgggtccgccaggctccaggcaaggggctggagtgggtggcagttatatggtttgatggaagtaatgactactatgcagactccgtgaagggccgattcaccatctccagagacaattccaagaacacgctgtcactgcaaatgaacagcctgagagccgaggacacggctgtgtattactgtgcgagagatagaagcgtcggctacgacggtttagatgtctggggccaagggaccacggtcaccgtctcctca

SEQ ID NO: 30618 - protein, 120 aa, synthetic construct
  REGION 1..120: note = Description of Artificial Sequence: Synthetic polypeptide
QVQLVESGGGVVQPGRSLRLSCAASGFTFRNYGMHWVRQAPGKGLEWVAVIWFDGSNDYYADSVKGRFTISRDNSKNTLSLQMNSLRAEDTAVYYCARDRSVGYDGLDVWGQGTTVTVSS

SEQ ID NO: 30619 - DNA, 360 bp, synthetic construct
  misc_feature 1..360: note = Description of Artificial Sequence: Synthetic polynucleotide
  source 1..360: mol_type = other DNA
caggtgcagctggtggaatctgggggaggcgtggtccagcctgggaggtccctgaaactctcctgtgcagcgtctggattcaccttcagtacctatggcatgcactgggtccgccaggctccaggcaagggactggagtgggtggcagttatatggtatgatggaactaataaaaactatgcagactccgtgaagggccgattcaccatctccagagacaattccaagaacacgctgtgtctgcaaatgaacagcctgagagccgaggacacggctgtgtattactgtgcgagagatcagggcgtgggctacgacggtttggacgtctggggccaagggaccacggtcaccgtctcctca

SEQ ID NO: 30620 - protein, 120 aa, synthetic construct
  REGION 1..120: note = Description of Artificial Sequence: Synthetic polypeptide
QVQLVESGGGVVQPGRSLKLSCAASGFTFSTYGMHWVRQAPGKGLEWVAVIWYDGTNKNYADSVKGRFTISRDNSKNTLCLQMNSLRAEDTAVYYCARDQGVGYDGLDVWGQGTTVTVSS

SEQ ID NO: 30621 - DNA, 360 bp, synthetic construct
  misc_feature 1..360: note = Description of Artificial Sequence: Synthetic polynucleotide
  source 1..360: mol_type = other DNA
caggtgcagctgcaggagtcgggcccaggactggtgaagccttcggagaccctgtccctcacctgcactgtctctggtggctccatcagtagttatcactggagctggatccggcagcccgccgggaagggactggagtggattggccatatctataccagtgggagcaccaagtacaacccctccctcaagagtcgagtcaccatgtcagtagacacgtccaagaaccagttctccctgaagctgagctctgtgaccgccgcggacacggccgtgtattactgtgcgagactccggtataactggaacttccctttctttgactattggggccagggaaccctggtcaccgtctcctca

SEQ ID NO: 30622 - protein, 120 aa, synthetic construct
  REGION 1..120: note = Description of Artificial Sequence: Synthetic polypeptide
QVQLQESGPGLVKPSETLSLTCTVSGGSISSYHWSWIRQPAGKGLEWIGHIYTSGSTKYNPSLKSRVTMSVDTSKNQFSLKLSSVTAADTAVYYCARLRYNWNFPFFDYWGQGTLVTVSS

SEQ ID NO: 30623 - DNA, 354 bp, synthetic construct
  misc_feature 1..354: note = Description of Artificial Sequence: Synthetic polynucleotide
  source 1..354: mol_type = other DNA
caggtgcagctggtgcagtctggggctgaggtgaagaagcctggggcctcagtgaaggtctcctgcaaggcttctggatacaccttcaccaattatgatatcaactgggtgcgacaggccactggacaagggcttgagtggatgggatggatgcaccctaacagtggtaacacaggctatgcacagaagttccagggcagagtcaccatgaccaggaacacctccataagcacagcctacatggagctgagcagcctgagatctgaggacacggccgtgtattactgtgcccatagcagtggctggtactactttgactactggggccagggaaccctggtcaccgtctcctca

SEQ ID NO: 30624 - protein, 118 aa, synthetic construct
  REGION 1..118: note = Description of Artificial Sequence: Synthetic polypeptide
QVQLVQSGAEVKKPGASVKVSCKASGYTFTNYDINWVRQATGQGLEWMGWMHPNSGNTGYAQKFQGRVTMTRNTSISTAYMELSSLRSEDTAVYYCAHSSGWYYFDYWGQGTLVTVSS

SEQ ID NO: 30625 - DNA, 381 bp, synthetic construct
  misc_feature 1..381: note = Description of Artificial Sequence: Synthetic polynucleotide
  source 1..381: mol_type = other DNA
caggtgcagctgcaggagtcgggcccaggactggtgaagccttcacagaccctgtccctcacctgcactgtttctggtggctccatcaacagtggtggttactactggaactggatccgccagcacccagggaagggcctggagtggattgggtacatcttttacagtgggagcacctactacaacccgtccctcaagagtcgagtcaccatatcagtagacacgtctaagaaccagttctccctgaagctgagctctgtgactgccgcggacacggccgtgtattactgtgcgagaggggattacgatggttcggggagttatcactactattacggtatggacgtctggggccaagggaccacggtcaccgtctcctca

SEQ ID NO: 30626 - protein, 127 aa, synthetic construct
  REGION 1..127: note = Description of Artificial Sequence: Synthetic polypeptide
QVQLQESGPGLVKPSQTLSLTCTVSGGSINSGGYYWNWIRQHPGKGLEWIGYIFYSGSTYYNPSLKSRVTISVDTSKNQFSLKLSSVTAADTAVYYCARGDYDGSGSYHYYYGMDVWGQGTTVTVSS

SEQ ID NO: 30627 - DNA, 360 bp, synthetic construct
  misc_feature 1..360: note = Description of Artificial Sequence: Synthetic polynucleotide
  source 1..360: mol_type = other DNA
caggtgcagctggtggagtctgggggaggcgtggtccagcctgggaggtccctgagactctcctgtgcagcgtctggattcaccttcagtagctatggcatgcactgggtccgccaggctccaggcaaggggctggagtgggtggcagttatatggtatgatggaagtaatgaacactatgcagactccgtgaagggccgattcaccatctccagagacaattccaagaacacgctgtatctgcaaatgaacagcctgagagccgaggacacggctgtgtattactgtgcgagagataggggggtgggttactacggtttggacgtctggggccaagggaccacggtcaccgtctcctca

SEQ ID NO: 30628 - protein, 120 aa, synthetic construct
  REGION 1..120: note = Description of Artificial Sequence: Synthetic polypeptide
QVQLVESGGGVVQPGRSLRLSCAASGFTFSSYGMHWVRQAPGKGLEWVAVIWYDGSNEHYADSVKGRFTISRDNSKNTLYLQMNSLRAEDTAVYYCARDRGVGYYGLDVWGQGTTVTVSS

SEQ ID NO: 30629 - DNA, 381 bp, synthetic construct
  misc_feature 1..381: note = Description of Artificial Sequence: Synthetic polynucleotide
  source 1..381: mol_type = other DNA
caggtgcagctgcaggagtcgggcccaggactggtgaagccttcacagaccctgtccctcacctgcactgtctctggtggctccatcagcagtggtgattactactggaactggatccgccagcacccagggaagggcctggagtggattgggtacatcttttacagtgggagcacctactacaacccgtccctcaagagtcgagttaccatatcagtagacacgtctaagaaccagttctccctgaagctgagctctgtgactgccgcggacacggccgtgtattactgtgcgagaggggattacgatggttcggggagttatcactactactacggtatggacgtctggggccaagggaccacggtcaccgtctcctca

SEQ ID NO: 30630 - protein, 127 aa, synthetic construct
  REGION 1..127: note = Description of Artificial Sequence: Synthetic polypeptide
QVQLQESGPGLVKPSQTLSLTCTVSGGSISSGDYYWNWIRQHPGKGLEWIGYIFYSGSTYYNPSLKSRVTISVDTSKNQFSLKLSSVTAADTAVYYCARGDYDGSGSYHYYYGMDVWGQGTTVTVSS

SEQ ID NO: 30631 - DNA, 381 bp, synthetic construct
  misc_feature 1..381: note = Description of Artificial Sequence: Synthetic polynucleotide
  source 1..381: mol_type = other DNA
caggtgcagctgcaggagtcgggcccaggactggtgaagccttcacagaccctgtccctcacctgcactgtctctggtggctccatcagcagtggtgattactactggaactggatccgccagctcccagggaagggcctggagtggattgggtacatcttttacagtgggagcacctactacaacccgtccctcaagagtcgacttaccatatcagtggacacgtctaagaaccagttctccctgaaactgaactctgtgactgccgcggacacggccgtgtattactgtgcgagaggggattacgatggttcggggagttatcacttctactacggtatggacgtctggggccaagggaccacggtcaccgtctcctca

SEQ ID NO: 30632 - protein, 127 aa, synthetic construct
  REGION 1..127: note = Description of Artificial Sequence: Synthetic polypeptide
QVQLQESGPGLVKPSQTLSLTCTVSGGSISSGDYYWNWIRQLPGKGLEWIGYIFYSGSTYYNPSLKSRLTISVDTSKNQFSLKLNSVTAADTAVYYCARGDYDGSGSYHFYYGMDVWGQGTTVTVSS

SEQ ID NO: 30633 - DNA, 381 bp, synthetic construct
  misc_feature 1..381: note = Description of Artificial Sequence: Synthetic polynucleotide
  source 1..381: mol_type = other DNA
caggtgcaactgaaggagtcgggcccaggactggtgaagccttcacagaccctgtccctcacctgcactgtctctggtggctccatcaacagtggtgattactactggaactggatccgccagcacccagggaagggcctggactggattgggtacatcttttacagtgggagcacctactacaacccgtccctcaagagtcgagttaccatatcagtagacacgtctaagaaccagttctccctgaagctgagctctgtgactgccgcggacacggccgtgtattactgtgcgagaggggattacgatggttcggggagttatcactactattacggtatggacgtctggggccaagggaccacggtcaccgtctcctca

SEQ ID NO: 30634 - protein, 127 aa, synthetic construct
  REGION 1..127: note = Description of Artificial Sequence: Synthetic polypeptide
QVQLKESGPGLVKPSQTLSLTCTVSGGSINSGDYYWNWIRQHPGKGLDWIGYIFYSGSTYYNPSLKSRVTISVDTSKNQFSLKLSSVTAADTAVYYCARGDYDGSGSYHYYYGMDVWGQGTTVTVSS

SEQ ID NO: 30635 - DNA, 360 bp, synthetic construct
  misc_feature 1..360: note = Description of Artificial Sequence: Synthetic polynucleotide
  source 1..360: mol_type = other DNA
cagctgcagctgcaggagtcgggcccaggactggtgaagccttcggagaccctgtccctcacctgcactgtctctggtggctccatcagaagctaccactggagctggatccggcagcccgccgggaagggactggagtggattggacttatctataccagtaggagcaccaattacaacccctccctcaagagtcgagtcaccatgtcagttgacacgtccaagaaccagttctccctgaagctgaactctgtgaccgccgcggacacggccgtgtattactgtgcgagactccggtataactggaacttcccttactttgactactggggccagggaaccctggtcaccgtctcctca

SEQ ID NO: 30636 - protein, 120 aa, synthetic construct
  REGION 1..120: note = Description of Artificial Sequence: Synthetic polypeptide
QLQLQESGPGLVKPSETLSLTCTVSGGSIRSYHWSWIRQPAGKGLEWIGLIYTSRSTNYNPSLKSRVTMSVDTSKNQFSLKLNSVTAADTAVYYCARLRYNWNFPYFDYWGQGTLVTVSS

SEQ ID NO: 30637 - DNA, 354 bp, synthetic construct
  misc_feature 1..354: note = Description of Artificial Sequence: Synthetic polynucleotide
  source 1..354: mol_type = other DNA
caggtgcagctggtgcagtctggggctgaggtgaagaagcctggggcctcagtgaaggtctcctgcaaggcttctggatacaccttcaccaattatgatatcaactgggtgcgacaggccactggacaagggcttgagtggatgggacggatgaaccctaacagtggtaacacaggctatgcacagaagttccagggcagagtcaccatgaccaggaacacctccataagcacagcctacatggagctgagcagcctgagatctgaggacacggccgtgtattactgtgcccatagcagtggctggtacatctttgactactggggccagggaaccctggtcaccgtctcctca

SEQ ID NO: 30638 - protein, 118 aa, synthetic construct
  REGION 1..118: note = Description of Artificial Sequence: Synthetic polypeptide
QVQLVQSGAEVKKPGASVKVSCKASGYTFTNYDINWVRQATGQGLEWMGRMNPNSGNTGYAQKFQGRVTMTRNTSISTAYMELSSLRSEDTAVYYCAHSSGWYIFDYWGQGTLVTVSS

SEQ ID NO: 30639 - DNA, 360 bp, synthetic construct; identical to SEQ ID NO: 28165
  misc_feature 1..360: note = Description of Artificial Sequence: Synthetic polynucleotide
  source 1..360: mol_type = other DNA

SEQ ID NO: 30640 - protein, 120 aa, synthetic construct; identical to SEQ ID NO: 28166
  REGION 1..120: note = Description of Artificial Sequence: Synthetic polypeptide

SEQ ID NO: 30641 - DNA, 360 bp, synthetic construct; identical to SEQ ID NO: 30601
  misc_feature 1..360: note = Description of Artificial Sequence: Synthetic polynucleotide
  source 1..360: mol_type = other DNA

SEQ ID NO: 30642 - protein, 120 aa, synthetic construct; identical to SEQ ID NO: 30602
  REGION 1..120: note = Description of Artificial Sequence: Synthetic polypeptide

SEQ ID NO: 30643 - DNA, 360 bp, synthetic construct
  misc_feature 1..360: note = Description of Artificial Sequence: Synthetic polynucleotide
  source 1..360: mol_type = other DNA
caggtgcagttggtggagtctgggggaggcgtgggccagcctgggaggtccctgagactctcctgtgcagcgtctggattcaccttcagtagttatggcatgcactgggtccgccaggctccaggcaaggggctggagtgggtggcagttatatggtatgatggaagtaataaaaactatgcagactccgtgaagggccgattcaccatctccagagacaattccaagaacacgctgtatctgcaaatgaacagcctgagagccgaggacacggctgtgtattactgtgcgagagatttctctgtagggtacgacggtatggacgtctggggccaagggaccacggtcaccgtctcctca

SEQ ID NO: 30644 - protein, 120 aa, synthetic construct
  REGION 1..120: note = Description of Artificial Sequence: Synthetic polypeptide
QVQLVESGGGVGQPGRSLRLSCAASGFTFSSYGMHWVRQAPGKGLEWVAVIWYDGSNKNYADSVKGRFTISRDNSKNTLYLQMNSLRAEDTAVYYCARDFSVGYDGMDVWGQGTTVTVSS

SEQ ID NO: 30645 - DNA, 363 bp, synthetic construct
  misc_feature 1..363: note = Description of Artificial Sequence: Synthetic polynucleotide
  source 1..363: mol_type = other DNA
caggtgcagctgcaggagtcgggcccaggactggtgaagccttcacagaccctgtccctcacctgcactgtctctggtggctccatcagcagtggtggttactactggaactggatccgccagcacccagggaagggcctggagtggattgggtacatcttttacagtgggagcacctactacaacccgtccctcaggagtcgacttaccatatcaatagacacgtctaagaaccagttctccctgaagctgacctctgtgactgccgcggacacggccgtatattactgtgggagatccgggtataactgggacaacggggtcgacccctggggccagggaaccctggtcaccgtctcctca

SEQ ID NO: 30646 - protein, 121 aa, synthetic construct
  REGION 1..121: note = Description of Artificial Sequence: Synthetic polypeptide
QVQLQESGPGLVKPSQTLSLTCTVSGGSISSGGYYWNWIRQHPGKGLEWIGYIFYSGSTYYNPSLRSRLTISIDTSKNQFSLKLTSVTAADTAVYYCGRSGYNWDNGVDPWGQGTLVTVSS

SEQ ID NO: 30647 - DNA, 348 bp, synthetic construct
  misc_feature 1..348: note = Description of Artificial Sequence: Synthetic polynucleotide
  source 1..348: mol_type = other DNA
gagatacaggtggtggagtctgggggaggcctggtcaagcctggggggtccctgagactctcctgtgcagcctctggattcaccttcagagactatagcatgaactgggtccgccaggctccagggaaggggctggagtgggtctcatccattagtagtggtagtggttacatatattatgcagactcagtgaagggccgattcaccatctccagagacaacgccaagaactcactgtatctgcaaatgaacagcctgagagccgaggacacggctgtgtattactgtgcgagagctactatggcccttgactactggggccagggagccctggtcaccgtctcctca

SEQ ID NO: 30648 - protein, 116 aa, synthetic construct
  REGION 1..116: note = Description of Artificial Sequence: Synthetic polypeptide
EIQVVESGGGLVKPGGSLRLSCAASGFTFRDYSMNWVRQAPGKGLEWVSSISSGSGYIYYADSVKGRFTISRDNAKNSLYLQMNSLRAEDTAVYYCARATMALDYWGQGALVTVSS

SEQ ID NO: 30649 - DNA, 369 bp, synthetic construct; identical to SEQ ID NO: 30605
  misc_feature 1..369: note = Description of Artificial Sequence: Synthetic polynucleotide
  source 1..369: mol_type = other DNA

SEQ ID NO: 30650 - protein, 123 aa, synthetic construct; identical to SEQ ID NO: 30606
  REGION 1..123: note = Description of Artificial Sequence: Synthetic polypeptide

SEQ ID NO: 30651 - DNA, 360 bp, synthetic construct
  misc_feature 1..360: note = Description of Artificial Sequence: Synthetic polynucleotide
  source 1..360: mol_type = other DNA
caggtgcagctggtggagtctgggggaggcgtggtccagcctgggaggtccctgagactctcctgtgcaacgtctggattcaccttcagtagctatggcatgcactgggtccgccaggctccaggcaaggggctggagtgggtggcagttatatggtatgatggaagtaataaacattatgcagactccgtgaagggccgattcaccatctccagagacaattccaagaacacactatatctgcaaatgaacagcctgagagccgaggacacggctgtttattactgtgcgagagatagaacagtgggatactccggtatggacgtctggggccaagggaccacggtcaccgtctcctca

SEQ ID NO: 30652 - protein, 120 aa, synthetic construct
  REGION 1..120: note = Description of Artificial Sequence: Synthetic polypeptide
QVQLVESGGGVVQPGRSLRLSCATSGFTFSSYGMHWVRQAPGKGLEWVAVIWYDGSNKHYADSVKGRFTISRDNSKNTLYLQMNSLRAEDTAVYYCARDRTVGYSGMDVWGQGTTVTVSS

SEQ ID NO: 30653 - DNA, 360 bp, synthetic construct
  misc_feature 1..360: note = Description of Artificial Sequence: Synthetic polynucleotide
  source 1..360: mol_type = other DNA
cagctgcagctgcaggagtcgggcccaggactggtgaagccttcggagaccctgtccctcacctgcactgtctctggtggctccatcagaagctaccactggagctggatccggcagcccgccgggaagggactggagtggattgggcttatctataccagtaggagcaccaattacaacccctccctcaagagtcgagtcaccatgtcagtagacacgtccaagaaccagttctccctgaagctgagctctgtgaccgccgcggacacggccgtgtattactgtgcgagactccggtataactggaacttcccttactttgacttctggggccagggaaccctggtcaccgtctcctca

SEQ ID NO: 30654 - protein, 120 aa, synthetic construct
  REGION 1..120: note = Description of Artificial Sequence: Synthetic polypeptide
QLQLQESGPGLVKPSETLSLTCTVSGGSIRSYHWSWIRQPAGKGLEWIGLIYTSRSTNYNPSLKSRVTMSVDTSKNQFSLKLSSVTAADTAVYYCARLRYNWNFPYFDFWGQGTLVTVSS

SEQ ID NO: 30655 - DNA, 360 bp, synthetic construct
  misc_feature 1..360: note = Description of Artificial Sequence: Synthetic polynucleotide
  source 1..360: mol_type = other DNA
caggtgcagctggtggagtctgggggaggcgtggtccagcctgggaggtccctgagactctcctgtgcagcgtctggattcaccttcagtagctatggcatgcactgggtccgccaggctccaggcaaggggctggagtgggtggcagttatatggtatgatggaagtaataaaaactacgcagactccgtgaagggccgattcaccatctccagagacaattccaagaacacgctgtatctgcaaatgaacagcctgagagccgaggacacggctatgtattactgtgcgagagatcagggcgtgggctacgacggtttggacgtctggggccaagggacctcggtcaccgtctcctca

SEQ ID NO: 30656 - protein, 120 aa, synthetic construct
  REGION 1..120: note = Description of Artificial Sequence: Synthetic polypeptide
QVQLVESGGGVVQPGRSLRLSCAASGFTFSSYGMHWVRQAPGKGLEWVAVIWYDGSNKNYADSVKGRFTISRDNSKNTLYLQMNSLRAEDTAMYYCARDQGVGYDGLDVWGQGTSVTVSS

SEQ ID NO: 30657 - DNA, 360 bp, synthetic construct
  misc_feature 1..360: note = Description of Artificial Sequence: Synthetic polynucleotide
  source 1..360: mol_type = other DNA
gaggtgcagctgttggagtctgggggaggcttggtacagcctggggggtccctgagactctcctgtgcagcctctggattcacctttagcacctatgccatgagttgggtccgccaggctccagggaaggggctggagtgggtctcagctattagtcgtagtggtggtaacacacactacgcagactccgtgaagggccggttcaccatctccagagacaattccaagaatacgctgtatctgcaaatgaacagcctgagagccgaggacacggccgtatattcctgtgcgaaagatggattcggtgggagctcctactttgactactggggccagggaaccctggtcaccgtctcctca

SEQ ID NO: 30658 - protein, 120 aa, synthetic construct
  REGION 1..120: note = Description of Artificial Sequence: Synthetic polypeptide
EVQLLESGGGLVQPGGSLRLSCAASGFTFSTYAMSWVRQAPGKGLEWVSAISRSGGNTHYADSVKGRFTISRDNSKNTLYLQMNSLRAEDTAVYSCAKDGFGGSSYFDYWGQGTLVTVSS

SEQ ID NO: 30659 - DNA, 339 bp, synthetic construct; identical to SEQ ID NO: 30581
  misc_feature 1..339: note = Description of Artificial Sequence: Synthetic polynucleotide
  source 1..339: mol_type = other DNA

SEQ ID NO: 30660 - protein, 113 aa, synthetic construct; identical to SEQ ID NO: 30582
  REGION 1..113: note = Description of Artificial Sequence: Synthetic polypeptide

SEQ ID NO: 30661 - DNA, 351 bp, synthetic construct
  misc_feature 1..351: note = Description of Artificial Sequence: Synthetic polynucleotide
  source 1..351: mol_type = other DNA
caggtgcagctggtggagtctgggggaggcgtggtccagcctgggaggtccctgagactctcctgtgtagcgtctggattcaccttcagtgactatggcatgcactgggtccgccaggctccaggcaaggggctggagtgggtggcagttatttggtatgatgaaactaataaacactatggagactccgtgaagggccgattcaccatctccagagacaattccaaggacacgctgtatctgcaaatgaacagcctgagagccgaggacacggctgtgtattactgtgcgagagaggttggctggcacgatgactattggggccagggaaccctggtcaccgtctcctca

SEQ ID NO: 30662 - protein, 117 aa, synthetic construct
  REGION 1..117: note = Description of Artificial Sequence: Synthetic polypeptide
QVQLVESGGGVVQPGRSLRLSCVASGFTFSDYGMHWVRQAPGKGLEWVAVIWYDETNKHYGDSVKGRFTISRDNSKDTLYLQMNSLRAEDTAVYYCAREVGWHDDYWGQGTLVTVSS

SEQ ID NO: 30663 - DNA, 351 bp, synthetic construct
  misc_feature 1..351: note = Description of Artificial Sequence: Synthetic polynucleotide
  source 1..351: mol_type = other DNA
caggtgcagctggtggagtctgggggaggcgtggtccagcctgggaggtccctgagactctcctgtgcagcgtctggattcaccttcagtgactatggcatgcactgggtccgccaggctccaggcaaggggctggagtgggtggcagttatttggtatgatgaaactaataaacactatggagactccgtgaagggccgattcaccatctccagagacaattccaaggacacgctgtatctgcaaatgaacagcctgagagccgaggacacggctgtgtattactgtgcgagagaggttggctggcacgatgactattggggccagggaaccctggtcaccgtctcctca

SEQ ID NO: 30664 - protein, 117 aa, synthetic construct
  REGION 1..117: note = Description of Artificial Sequence: Synthetic polypeptide
QVQLVESGGGVVQPGRSLRLSCAASGFTFSDYGMHWVRQAPGKGLEWVAVIWYDETNKHYGDSVKGRFTISRDNSKDTLYLQMNSLRAEDTAVYYCAREVGWHDDYWGQGTLVTVSS

SEQ ID NO: 30665 - DNA, 345 bp, synthetic construct
  misc_feature 1..345: note = Description of Artificial Sequence: Synthetic polynucleotide
  source 1..345: mol_type = other DNA
gaggtgcagctggtggagtctgggggaggcctggtcaagcctggggggtccctgagactctcctgtgcagcctctggattcaccttcaatagctatagcatgaactgggtccgccaggctccagggaaggggctggagtgggtctcatccattagcagtagtggtagttacatatattacgcagactcagtgaagggccgattcaccatctccagagacaacgccaagaactcactgtatctgcaaatgcacagcctgagagccgaggacacggctgtgtattactgtgcgagaagcaacctttttgactgctggggccagggaaccccggtcaccgtctcctca

SEQ ID NO: 30666 - protein, 115 aa, synthetic construct
  REGION 1..115: note = Description of Artificial Sequence: Synthetic polypeptide
EVQLVESGGGLVKPGGSLRLSCAASGFTFNSYSMNWVRQAPGKGLEWVSSISSSGSYIYYADSVKGRFTISRDNAKNSLYLQMHSLRAEDTAVYYCARSNLFDCWGQGTPVTVSS

SEQ ID NO: 30667 - DNA, 339 bp, synthetic construct; identical to SEQ ID NO: 30581
  misc_feature 1..339: note = Description of Artificial Sequence: Synthetic polynucleotide
  source 1..339: mol_type = other DNA

SEQ ID NO: 30668 - protein, 113 aa, synthetic construct; identical to SEQ ID NO: 30582
  REGION 1..113: note = Description of Artificial Sequence: Synthetic polypeptide

SEQ ID NO: 30669 - DNA, 363 bp, synthetic construct
  misc_feature 1..363: note = Description of Artificial Sequence: Synthetic polynucleotide
  source 1..363: mol_type = other DNA
caggtgcagctggtggagtctgggggaggcgtggtccagcctgggaggtccctgagactctcctgtgcagcgtctggattcaccttcagtacctatggcatgcactgggtccgccaggctccaggcaaggggctggagtgggtggcaattatatggtatgatggaagttataaatattatgcagactccgtgaagggccgattcaccatctccagagacaattccaagaacacgctgtatctgcaaatgaacagcctgagagccgaggacacggctgtgtattactgtgcgagagatcattacgatttttggagtgggcactttgactactggggccagggaaccctggtcaccgtctcctca

SEQ ID NO: 30670 - protein, 121 aa, synthetic construct
  REGION 1..121: note = Description of Artificial Sequence: Synthetic polypeptide
QVQLVESGGGVVQPGRSLRLSCAASGFTFSTYGMHWVRQAPGKGLEWVAIIWYDGSYKYYADSVKGRFTISRDNSKNTLYLQMNSLRAEDTAVYYCARDHYDFWSGHFDYWGQGTLVTVSS

SEQ ID NO: 30671 - DNA, 354 bp, synthetic construct; identical to SEQ ID NO: 30591
  misc_feature 1..354: note = Description of Artificial Sequence: Synthetic polynucleotide
  source 1..354: mol_type = other DNA

SEQ ID NO: 30672 - protein, 118 aa, synthetic construct; identical to SEQ ID NO: 30592
  REGION 1..118: note = Description of Artificial Sequence: Synthetic polypeptide

SEQ ID NO: 30673 - DNA, 339 bp, synthetic construct
  misc_feature 1..339: note = Description of Artificial Sequence: Synthetic polynucleotide
  source 1..339: mol_type = other DNA
caggtgcagctggtgcagtctggggctgaggtgaagacgcctggggcctcagtgaaggtctcctgcagggcttctggatacaccttcaccagctacaatatgcactgggtacgacaggtccctggacaagggcttgagtggatgggatggatcaaccctaacagtggtggctcaaactatacacagaagtttcagggcaggatcaccatgaccagggacacgtccatcagcacagcctacatggagctgagcaggctgagatctgacgacacggccgtatattactgtgcgagaaagtttggggactggggccagggaaccctggtcaccgtctcctca

SEQ ID NO: 30674 - protein, 113 aa, synthetic construct
  REGION 1..113: note = Description of Artificial Sequence: Synthetic polypeptide
QVQLVQSGAEVKTPGASVKVSCRASGYTFTSYNMHWVRQVPGQGLEWMGWINPNSGGSNYTQKFQGRITMTRDTSISTAYMELSRLRSDDTAVYYCARKFGDWGQGTLVTVSS

SEQ ID NO: 30675 - DNA, 354 bp, synthetic construct
  misc_feature 1..354: note = Description of Artificial Sequence: Synthetic polynucleotide
  source 1..354: mol_type = other DNA
gaggtgcagctgttggagtctgggggaggcttggtacagcctggggggtccctgagactctcctgtgcagcctctggattcacctttagcagctctgccatgaactgggtccgccaggctccagggaaggggctggagtgggtctcagttattagtggtagtggtggttacacatactacgcagactccgtgaagggccggttcaccatctccagagacaattccaagaacacgctgtatctgcaaatgaacagcctgagagccgaggacacggccgtatatttctgtgcgaaaaggaacaccgatgatgcttttgatatctggggccaagggacaatggtcaccgtctcttca

SEQ ID NO: 30676 - protein, 118 aa, synthetic construct
  REGION 1..118: note = Description of Artificial Sequence: Synthetic polypeptide
EVQLLESGGGLVQPGGSLRLSCAASGFTFSSSAMNWVRQAPGKGLEWVSVISGSGGYTYYADSVKGRFTISRDNSKNTLYLQMNSLRAEDTAVYFCAKRNTDDAFDIWGQGTMVTVSS

SEQ ID NO: 30677 - DNA, 339 bp, synthetic construct
  misc_feature 1..339: note = Description of Artificial Sequence: Synthetic polynucleotide
  source 1..339: mol_type = other DNA
caggtgcagctggtgcagtctggggctgaggtgaagacgcctggggcctcagtgaaggtctcctgcagggcttctggatacaccttcaccagctacaatatgcactgggtgcgacaggtccctggacaagggcttgagtggatgggatggatcaaccctaacagtggtggctcaaactatacacagaagtttcagggcagggtcaccatgaccagggacacgtccatcagcacagcctacatggagctgagcaggctgagatctgacgacacggccgtgtattactgtgcgagaaagtttggggactggggccagggaaccctggtcaccgtctcctca

SEQ ID NO: 30678 - protein, 113 aa, synthetic construct
  REGION 1..113: note = Description of Artificial Sequence: Synthetic polypeptide
QVQLVQSGAEVKTPGASVKVSCRASGYTFTSYNMHWVRQVPGQGLEWMGWINPNSGGSNYTQKFQGRVTMTRDTSISTAYMELSRLRSDDTAVYYCARKFGDWGQGTLVTVSS

SEQ ID NO: 30679 - DNA, 363 bp, synthetic construct
  misc_feature 1..363: note = Description of Artificial Sequence: Synthetic polynucleotide
  source 1..363: mol_type = other DNA
caggtgcagctggtggagtctgggggaggcgtggtccagcctgggaggtccctgagactctcctgtgcagcgtctggattcaccttcagtagttatggcatgcactgggtccgccaggctccaggcaaggggctggagtgggtgacaattatatggtatgatggaagttataaatactatgcagactccgtgaagggccgattcaccatctccagagacaattccaagaacacgctgtttctgcaaatgaacagcctgagagccgaagacacggctgtgtattactgtgcgagagagagatacgatttttggagtggtcattttgactactggggccagggaaccctggtcaccgtctcctca

SEQ ID NO: 30680 - protein, 121 aa, synthetic construct
  REGION 1..121: note = Description of Artificial Sequence: Synthetic polypeptide
QVQLVESGGGVVQPGRSLRLSCAASGFTFSSYGMHWVRQAPGKGLEWVTIIWYDGSYKYYADSVKGRFTISRDNSKNTLFLQMNSLRAEDTAVYYCARERYDFWSGHFDYWGQGTLVTVSS

SEQ ID NO: 30681 - DNA, 363 bp, synthetic construct
  misc_feature 1..363: note = Description of Artificial Sequence: Synthetic polynucleotide
  source 1..363: mol_type = other DNA
caggtgcagctggtggagtctgggggaggcgtggtccagcctgggaggtccctgagactctcctgtgcagcgtctggattcaccttcagtaactatggcatgcactgggtccgccaggctccaggcaaggggctggagtgggtggcaattatatggtatgatggaagttataaatactatgcagactccgtgaagggccgattcaccatctccagagacaattccaagaacacgctgtatctgcaaatgaacagcctgagagccgaggacacggctgtgtattattgtgcgagagatcgattcgatttttggagtggttattccgactactggggccagggaaccctggtcaccgtctcctca

SEQ ID NO: 30682 - protein, 121 aa, synthetic construct
  REGION 1..121: note = Description of Artificial Sequence: Synthetic polypeptide
QVQLVESGGGVVQPGRSLRLSCAASGFTFSNYGMHWVRQAPGKGLEWVAIIWYDGSYKYYADSVKGRFTISRDNSKNTLYLQMNSLRAEDTAVYYCARDRFDFWSGYSDYWGQGTLVTVSS

SEQ ID NO: 30683 - DNA, 348 bp, synthetic construct
  misc_feature 1..348: note = Description of Artificial Sequence: Synthetic polynucleotide
  source 1..348: mol_type = other DNA
caggtgcaactggtggagtctgggggaggcttggtcaagcctggagggtccctgagactctcctgtgcagcctctggattcaccttcagtgactactacatgagctggatccgccaggctccagggaaggggctggagtggctttcatacattagtagtagtggtactaccgtattctacgcagactctgtgaagggccgattcaccatctccagggacaacgccaagaactcactgtatctgcaaatgaacagcctgagagccgaggacacggccgtgtattactgtgcgagagaatgggtgggagccgactactggggccagggaaccctggtcaccgtctcctca

SEQ ID NO: 30684 - protein, 116 aa, synthetic construct
  REGION 1..116: note = Description of Artificial Sequence: Synthetic polypeptide
QVQLVESGGGLVKPGGSLRLSCAASGFTFSDYYMSWIRQAPGKGLEWLSYISSSGTTVFYADSVKGRFTISRDNAKNSLYLQMNSLRAEDTAVYYCAREWVGADYWGQGTLVTVSS

SEQ ID NO: 30685 - DNA, 381 bp, synthetic construct
  misc_feature 1..381: note = Description of Artificial Sequence: Synthetic polynucleotide
  source 1..381: mol_type = other DNA
caggtgcagctgcaggagtcgggcccaggactggtgaagccttcacagaccctgtccctcacctgcactgtctctggtggctccatcaacagtggtggttactactggaactggatccgccagcacccagggaagggcctggagtggattgggttcatcttttatagtgggagcacctactacaacccgtccctcaagagtcgagttaccatatcagtagacacgtctaagaaccagttctccctgaagctgaactctgtgactgccgcggacacggccgtgtattactgtgcgagaggggattacgatggttcggggagttatcactactattacggtatggacgtctggggccaagggaccacggtcaccgtctcctca

SEQ ID NO: 30686 - protein, 127 aa, synthetic construct
  REGION 1..127: note = Description of Artificial Sequence: Synthetic polypeptide
QVQLQESGPGLVKPSQTLSLTCTVSGGSINSGGYYWNWIRQHPGKGLEWIGFIFYSGSTYYNPSLKSRVTISVDTSKNQFSLKLNSVTAADTAVYYCARGDYDGSGSYHYYYGMDVWGQGTTVTVSS

SEQ ID NO: 30687 - DNA, 360 bp, synthetic construct
  misc_feature 1..360: note = Description of Artificial Sequence: Synthetic polynucleotide
  source 1..360: mol_type = other DNA
caggtgcagctggtggagtctgggggaggcgtggtccagcctgggaggtccctgagactctcctgtgcagcctctggattcaccttcagtagctatggcatgcactgggtccgccaggctccaggcaaggggctggagtgggtggcagttatatcatatgatggaggttataaaaactatgtagactccgtgaagggccgattcaccatctccagagacaattccaagaacacgctgtatctgcaaatgaatagcctgagagctgaggacacggctgtgtattactgtgcgagaggtacccacgggtactactacggtgtggacgtctggggccaagggaccacggtcaccgtctcctca

SEQ ID NO: 30688 - protein, 120 aa, synthetic construct
  REGION 1..120: note = Description of Artificial Sequence: Synthetic polypeptide
QVQLVESGGGVVQPGRSLRLSCAASGFTFSSYGMHWVRQAPGKGLEWVAVISYDGGYKNYVDSVKGRFTISRDNSKNTLYLQMNSLRAEDTAVYYCARGTHGYYYGVDVWGQGTTVTVSS

SEQ ID NO: 30689 - DNA, 360 bp, synthetic construct
  misc_feature 1..360: note = Description of Artificial Sequence: Synthetic polynucleotide
  source 1..360: mol_type = other DNA
gaggtgcaactgttggagtctgggggaggcttggtacagcctggggggtccctgagactctcctgtgcagcctctggattcacctttagcagctatgccatgagctgggtccgccaggctccagggaaggggctggagtgggtctcagctattagtggtcgtggtggtaacacatactacgcagactccgtgaagggccggttcaccatctccagagacaattccaagaacacgctgtatctgcaaatgaacagtttgagagccgaggacacggccgtatattactgtgcgaaagatggattcggtgggagctcctattttgactactggggccagggaaccctggtcaccgtctcctca

SEQ ID NO: 30690 - protein, 120 aa, synthetic construct
  REGION 1..120: note = Description of Artificial Sequence: Synthetic polypeptide
EVQLLESGGGLVQPGGSLRLSCAASGFTFSSYAMSWVRQAPGKGLEWVSAISGRGGNTYYADSVKGRFTISRDNSKNTLYLQMNSLRAEDTAVYYCAKDGFGGSSYFDYWGQGTLVTVSS

SEQ ID NO: 30691 - DNA, 381 bp, synthetic construct
  misc_feature 1..381: note = Description of Artificial Sequence: Synthetic polynucleotide
  source 1..381: mol_type = other DNA
caggtgcagctgcaggagtcgggcccaggactggtgaagccttcacagaccctgtccctcacctgcactgtctctggtggctccatcagcagtggtgattactactggaactggatccgccagcacccagggaagggcctggagtggattgggtacatcttttacagtgggagcacctactacaacccgtccctcaagagtcgagttaccatatcagtagacacgtctaagaaccagttctccctgaagctgagctctgtgactgccgcggacacggccgtatattactgtgcgagaggggattacgatggttcggggagttatcactactactacggtatggacgtctggggccaagggaccacggtcaccgtctcctca

SEQ ID NO: 30692 - protein, 127 aa, synthetic construct; identical to SEQ ID NO: 30630
  REGION 1..127: note = Description of Artificial Sequence: Synthetic polypeptide

SEQ ID NO: 30693 - DNA, 381 bp, synthetic construct
  misc_feature 1..381: note = Description of Artificial Sequence: Synthetic polynucleotide
  source 1..381: mol_type = other DNA
caggtgcagctgcaggagtcgggcccaggactggtgaacccttcacagaccctgtccctcacctgcactgtctctggtggctccatcagcagtggtgtttactactggagctggatccgccagcacccagggaagggcctggagtggattgggaacatctattacagtgggagcacctacaacaacccgtccctcaagagtcgaattatcatatcagtagacacgtctaagaaccagttctccctgaagctgagctctgtgactgccgcggacacggccgtgtattactgtgcgagaggggattacgatggttcggggagttatcactactactacggtttggacgtctggggccaagggaccacggtcaccgtctcctca

SEQ ID NO: 30694 - protein, 127 aa, synthetic construct
  REGION 1..127: note = Description of Artificial Sequence: Synthetic polypeptide
QVQLQESGPGLVNPSQTLSLTCTVSGGSISSGVYYWSWIRQHPGKGLEWIGNIYYSGSTYNNPSLKSRIIISVDTSKNQFSLKLSSVTAADTAVYYCARGDYDGSGSYHYYYGLDVWGQGTTVTVSS

SEQ ID NO: 30695 - DNA, 354 bp, synthetic construct
  misc_feature 1..354: note = Description of Artificial Sequence: Synthetic polynucleotide
  source 1..354: mol_type = other DNA
caggtgcagctggtgcagtctggggctgaggtgaagaagcctggggcctcagtgaaggtctcctgcaaggcttctggaaacaccttcaccaattatgatatcaactgggtgcgacaggccactggacaagggcttgagtggatgggatggatgaaccctaacagtggtaacacaggctatgcacagaagttccagggcagagtcaccatgaccaggaacacctccataagcacagcctacatggagctgagcagcctgagatctgaggacacggccgtgtattactgtgcccatagcagtggctggtacatctttgactactggggccagggaaccctggtcaccgtctcctca

SEQ ID NO: 30696 - protein, 118 aa, synthetic construct
  REGION 1..118: note = Description of Artificial Sequence: Synthetic polypeptide
QVQLVQSGAEVKKPGASVKVSCKASGNTFTNYDINWVRQATGQGLEWMGWMNPNSGNTGYAQKFQGRVTMTRNTSISTAYMELSSLRSEDTAVYYCAHSSGWYIFDYWGQGTLVTVSS

SEQ ID NO: 30697 - DNA, 360 bp, synthetic construct
  misc_feature 1..360: note = Description of Artificial Sequence: Synthetic polynucleotide
  source 1..360: mol_type = other DNA
caggtgcagctgcaggagtcgggcccaggactggtgaagccttcggagaccctgtccctcacctgcactgtctctggtggctccatcaataattactactggagctggatccggcagcccgccgggaagggactggagtggattgggcgtatctatgccagtgggagcaccaactacaacccctccctcaagagtcgagtcaccatgtcaatagacacgtccaagaaccagttctccctgaagctgagctctgtgaccgccgcggacacggccgtgtattactgtgcgagagatcggggatactatggctactacggtatggacgtctggggccaagggaccacggtcaccatctcctca

SEQ ID NO: 30698 - protein, 120 aa, synthetic construct
  REGION 1..120: note = Description of Artificial Sequence: Synthetic polypeptide
QVQLQESGPGLVKPSETLSLTCTVSGGSINNYYWSWIRQPAGKGLEWIGRIYASGSTNYNPSLKSRVTMSIDTSKNQFSLKLSSVTAADTAVYYCARDRGYYGYYGMDVWGQGTTVTISS

SEQ ID NO: 30699 - DNA, 360 bp, synthetic construct; identical to SEQ ID NO: 28165
  misc_feature 1..360: note = Description of Artificial Sequence: Synthetic polynucleotide
  source 1..360: mol_type = other DNA

SEQ ID NO: 30700 - protein, 120 aa, synthetic construct; identical to SEQ ID NO: 28166
  REGION 1..120: note = Description of Artificial Sequence: Synthetic polypeptide

SEQ ID NO: 30701 - DNA, 369 bp, synthetic construct
  misc_feature 1..369: note = Description of Artificial Sequence: Synthetic polynucleotide
  source 1..369: mol_type = other DNA
caggtgcagctggtggagtctgggggaggcgtggtccagcctgggaggtccctgagactctcctgtgcagcgtctggattcaccttcagtagctttatcatgcactgggtccgccaggctccaggcagggggctggagtgggtggcagttatatggtatgatggaagtaataaatactatgcagactccgtgaagggccgattcaccatctccagagacaattccaagaacacgctgtatctgcaaatgaacagcctgagagccgaggacacggctgtgtattactgtgcgagagaggagtatagcagtggctggttcgggtacggtatggacgtctggggccaagggaccacggtcaccgtctcctca

SEQ ID NO: 30702 - protein, 123 aa, synthetic construct
  REGION 1..123: note = Description of Artificial Sequence: Synthetic polypeptide
QVQLVESGGGVVQPGRSLRLSCAASGFTFSSFIMHWVRQAPGRGLEWVAVIWYDGSNKYYADSVKGRFTISRDNSKNTLYLQMNSLRAEDTAVYYCAREEYSSGWFGYGMDVWGQGTTVTVSS

SEQ ID NO: 30703 - DNA, 348 bp, synthetic construct; identical to SEQ ID NO: 30683
  misc_feature 1..348: note = Description of Artificial Sequence: Synthetic polynucleotide
  source 1..348: mol_type = other DNA

SEQ ID NO: 30704 - protein, 116 aa, synthetic construct; identical to SEQ ID NO: 30684
  REGION 1..116: note = Description of Artificial Sequence: Synthetic polypeptide

SEQ ID NO: 30705 - DNA, 354 bp, synthetic construct
  misc_feature 1..354: note = Description of Artificial Sequence: Synthetic polynucleotide
  source 1..354: mol_type = other DNA
caggtgcagctggtgcagtctggggctgaggtgaagaagcctggggcctcagtgaaggtctcctgcaaggcttctggatacaccttcaccaattatgatatcaactgggtgcgacaggccactggacaagggcttgagtggatgggatggatgaaccctaatagtggtaatacaggctatgcacagaagttccagggcagagtcaccatgaccaggaatacctccataagcacagcctacatggagctgagcagcctgagatctgaggacacggccgtgtattactgtgcgagtagcagtggctggtacttctttgactactggggccagggaaccctggtcaccgtctcctca

SEQ ID NO: 30706 - protein, 118 aa, synthetic construct; identical to SEQ ID NO: 29120
  REGION 1..118: note = Description of Artificial Sequence: Synthetic polypeptide

SEQ ID NO: 30707 - DNA, 360 bp, synthetic construct
  misc_feature 1..360: note = Description of Artificial Sequence: Synthetic polynucleotide
  source 1..360: mol_type = other DNA
cagctgcagctgcaggagtcgggcccaggactggtgaagccttcggagaccctgtccctcacctgcactgtctctggtggctccatcagaagttaccactggagttggatccggcagcccgccgggaagggactggagtggattgggcatatctataccagtaggagcaccaactacaacccctccctcaagagtcgagtcaccatttcagtagacacgtccaagaaccagttctccctgaagctgagctctgtgaccgccacggacacggccgtgtattactgtgcgagactccggtataactggaacttcccttactttgactactggggccagggaaccctggtcaccgtctcctca

SEQ ID NO: 30708 - protein, 120 aa, synthetic construct
  REGION 1..120: note = Description of Artificial Sequence: Synthetic polypeptide
QLQLQESGPGLVKPSETLSLTCTVSGGSIRSYHWSWIRQPAGKGLEWIGHIYTSRSTNYNPSLKSRVTISVDTSKNQFSLKLSSVTATDTAVYYCARLRYNWNFPYFDYWGQGTLVTVSS

SEQ ID NO: 30709 - DNA, 369 bp, synthetic construct
  misc_feature 1..369: note = Description of Artificial Sequence: Synthetic polynucleotide
  source 1..369: mol_type = other DNA
gaggtgcagctgttggactctgggggaggcttgggacagcctggggggtccctgagactctcctgtgcagcctctggattcacctttgacagctatgccatgagttgggtccgccaggctccagggaaggggctggagtgggtctcaactattagtggtactggtcgtaggacatactacgcagactccgtgaagggccggttcaccatctccagagacaattccaagaacacgctgtatctgcaaatgaatagcctgagagccgaggacacggccgtatattactgtgcgaaagaggaggattactatgatagtagtggcccggggttcgacccctggggccagggaaccctggtcaccgtctcctca

SEQ ID NO: 30710 - protein, 123 aa, synthetic construct
  REGION 1..123: note = Description of Artificial Sequence: Synthetic polypeptide
EVQLLDSGGGLGQPGGSLRLSCAASGFTFDSYAMSWVRQAPGKGLEWVSTISGTGRRTYYADSVKGRFTISRDNSKNTLYLQMNSLRAEDTAVYYCAKEEDYYDSSGPGFDPWGQGTLVTVSS

SEQ ID NO: 30711 - DNA, 360 bp, synthetic construct
  misc_feature 1..360: note = Description of Artificial Sequence: Synthetic polynucleotide
  source 1..360: mol_type = other DNA
caggtgcagctggtggagtctgggggaggcgtggtccagcctgggaggtccctgagactctcctgtgcagcgtctggattcaccttcagtacttatggcatgcactgggtccgccaggctccaggcaaggggctggagtgggtggcagttatatggtatgatggaagtaataaaaactatgcagactccgtgaagggccgattcaccatctccagagacaattccaagaacacgctgtatctgcaaatgaacagcctgagagccgaggacacggctgtgtattactgtgcgagagatcagggcgtgggctacgacggtttggacgtctggggccaagggaccacggtcaccgtctcctca

SEQ ID NO: 30712 - protein, 120 aa, synthetic construct
  REGION 1..120: note = Description of Artificial Sequence: Synthetic polypeptide
QVQLVESGGGVVQPGRSLRLSCAASGFTFSTYGMHWVRQAPGKGLEWVAVIWYDGSNKNYADSVKGRFTISRDNSKNTLYLQMNSLRAEDTAVYYCARDQGVGYDGLDVWGQGTTVTVSS

SEQ ID NO: 30713 - DNA, 369 bp, synthetic construct
  misc_feature 1..369: note = Description of Artificial Sequence: Synthetic polynucleotide
  source 1..369: mol_type = other DNA
ggggtacaactgttggactctgggggaggcttgggacagcctggggggtccctgagactctcctgtgcagcctctggattcacctttgacagctatgccatgagctgggtccgccaggctccagggaaggggctggagtgggtctcaactattagtggtactggtcgtaggacatattacgcagactccgtgaagggccggttcaccatctccagagacaattccaagaacacactgtatctgcagatgaatagcctgagagccgaggacacggccgtatattactgtgcgaaagaggaggattactatgatagtagtggcccggggttcgacccctggggccagggaaccctggtcaccgtctcctca

SEQ ID NO: 30714 - protein, 123 aa, synthetic construct
  REGION 1..123: note = Description of Artificial Sequence: Synthetic polypeptide
GVQLLDSGGGLGQPGGSLRLSCAASGFTFDSYAMSWVRQAPGKGLEWVSTISGTGRRTYYADSVKGRFTISRDNSKNTLYLQMNSLRAEDTAVYYCAKEEDYYDSSGPGFDPWGQGTLVTVSS

SEQ ID NO: 30715 - DNA, 360 bp, synthetic construct; identical to SEQ ID NO: 30617
  misc_feature 1..360: note = Description of Artificial Sequence: Synthetic polynucleotide
  source 1..360: mol_type = other DNA

SEQ ID NO: 30716 - protein, 120 aa, synthetic construct; identical to SEQ ID NO: 30618
  REGION 1..120: note = Description of Artificial Sequence: Synthetic polypeptide

SEQ ID NO: 30717 - DNA, 381 bp, synthetic construct
  misc_feature 1..381: note = Description of Artificial Sequence: Synthetic polynucleotide
  source 1..381: mol_type = other DNA
caggtgcaactgcaggagtcgggcccaggactggtgaagccttcacagaccctgtccctcacctgcactgtctctggtggctccatcaacagtggtgattactactggaactggatccgccagcacccagggaagggcctggagtggattgggtacatcttttacagtgggagcacctactacaacccgtccctcaagagtcgagttaccatatcagtagacacgtctaagaaccagttctccctgaagctgagctctgtgactgccgcggacacggccgtgtattactgtgcgagaggggattacgatggttcggggagttatcactactattacggtatggacgtctggggccaagggaccacggtcaccgtctcctca

SEQ ID NO: 30718 - protein, 127 aa, synthetic construct
  REGION 1..127: note = Description of Artificial Sequence: Synthetic polypeptide
QVQLQESGPGLVKPSQTLSLTCTVSGGSINSGDYYWNWIRQHPGKGLEWIGYIFYSGSTYYNPSLKSRVTISVDTSKNQFSLKLSSVTAADTAVYYCARGDYDGSGSYHYYYGMDVWGQGTTVTVSS

SEQ ID NO: 30719 - DNA, 360 bp, synthetic construct
  misc_feature 1..360: note = Description of Artificial Sequence: Synthetic polynucleotide
  source 1..360: mol_type = other DNA
caggtgcagctggtggagtctgggggaggcgtggtccagcctgggaggtccctgagactctcctgtgcagcgtctggattcaccttcagtaactatggcatgcactgggtccgccaggctccaggcaaggggctggagtgggtggcaattatatggtttgatggaagtaatcaatactatgccgactccgtgaagggccgattcaccatctccagagacaattccaagaacacgctgtatctgcaattgaacagcctgagagccgaggacacggctgtctattactgtgcgagagcccacggggtctactactacgctatggacgtctggggccaagggaccacggtcaccgtctcctca

SEQ ID NO: 30720 - protein, 120 aa, synthetic construct
  REGION 1..120: note = Description of Artificial Sequence: Synthetic polypeptide
QVQLVESGGGVVQPGRSLRLSCAASGFTFSNYGMHWVRQAPGKGLEWVAIIWFDGSNQYYADSVKGRFTISRDNSKNTLYLQLNSLRAEDTAVYYCARAHGVYYYAMDVWGQGTTVTVSS

SEQ ID NO: 30721 - DNA, 363 bp, synthetic construct
  misc_feature 1..363: note = Description of Artificial Sequence: Synthetic polynucleotide
  source 1..363: mol_type = other DNA
caggtgcagctgcaggagtcgggcccaggactggtgaagccttcacagaccctgtccctcacctgcactgtctctggtggctccatcagcagtggtggttactactggaactggatccgccagcacccagggaagggcctggattggattggatatatctattacagtgggagcacctactacaacccgtccctcaagagtcgagttaccatatcagtagacacgtctaagaaccagttctccctgaagctgaactctgtgactgccgcggacacggccgtgtattactgtgcgagatccgggtataattgggacgccggggtcgacccctggggccagggaaccctggtcaccgtctcctca

SEQ ID NO: 30722 - protein, 121 aa, synthetic construct
  REGION 1..121: note = Description of Artificial Sequence: Synthetic polypeptide
QVQLQESGPGLVKPSQTLSLTCTVSGGSISSGGYYWNWIRQHPGKGLDWIGYIYYSGSTYYNPSLKSRVTISVDTSKNQFSLKLNSVTAADTAVYYCARSGYNWDAGVDPWGQGTLVTVSS

SEQ ID NO: 30723 - DNA, 360 bp, synthetic construct; identical to SEQ ID NO: 30655
  misc_feature 1..360: note = Description of Artificial Sequence: Synthetic polynucleotide
  source 1..360: mol_type = other DNA

SEQ ID NO: 30724 - protein, 120 aa, synthetic construct; identical to SEQ ID NO: 30656
  REGION 1..120: note = Description of Artificial Sequence: Synthetic polypeptide

SEQ ID NO: 30725 - DNA, 360 bp, synthetic construct; identical to SEQ ID NO: 30655
  misc_feature 1..360: note = Description of Artificial Sequence: Synthetic polynucleotide
  source 1..360: mol_type = other DNA

SEQ ID NO: 30726 - protein, 120 aa, synthetic construct; identical to SEQ ID NO: 30656
  REGION 1..120: note = Description of Artificial Sequence: Synthetic polypeptide

SEQ ID NO: 30727 - DNA, 348 bp, synthetic construct
  misc_feature 1..348: note = Description of Artificial Sequence: Synthetic polynucleotide
  source 1..348: mol_type = other DNA
caggtgcagctggtggagtctgggggaggcttggtcaagcctggagggtccctgagactctcctgtgcagcctctggattcaccttcagtgactactacatgagctggatccgccaggctccagggaaggggctggagtgggtttcatacattagtagtagtggtactaccgtattctacgcagactctgtgaagggccgattcaccatctccagggacaacgccaagaactcactgtatctgcaaatgaacagcctgagagccgaggacacggccgtgtattactgtgcgagagaatgggtgggagccgactactggggccagggaaccctggtcaccgtctcctca

SEQ ID NO: 30728 - protein, 116 aa, synthetic construct
  REGION 1..116: note = Description of Artificial Sequence: Synthetic polypeptide
QVQLVESGGGLVKPGGSLRLSCAASGFTFSDYYMSWIRQAPGKGLEWVSYISSSGTTVFYADSVKGRFTISRDNAKNSLYLQMNSLRAEDTAVYYCAREWVGADYWGQGTLVTVSS

SEQ ID NO: 30729 - DNA, 360 bp, synthetic construct; identical to SEQ ID NO: 30601
  misc_feature 1..360: note = Description of Artificial Sequence: Synthetic polynucleotide
  source 1..360: mol_type = other DNA

SEQ ID NO: 30730 - protein, 120 aa, synthetic construct; identical to SEQ ID NO: 30602
  REGION 1..120: note = Description of Artificial Sequence: Synthetic polypeptide

SEQ ID NO: 30731 - DNA, 381 bp, synthetic construct
  misc_feature 1..381: note = Description of Artificial Sequence: Synthetic polynucleotide
  source 1..381: mol_type = other DNA
caggtgcagctggtggagtctgggggaggcgtggtccagcctgggaggtccctgagactctcctgtgcagcgtctggattcaccttcagtagctatggcatgcactgggtccgccaggctccaggcaaggggctggagtggctggcagttatatggtatgatggaagttataaatactatgcagactccgtgaagggccgattcaccatctccagagacaattccaagaacacgctgtatctgcaaatgaacagcctgagagccgaggacacggctgtgtattactgtgcgagagaggattccccttatagtggctacgccttggactacttctacggtatggacgtctggggccaagggaccacggtcaccgtctcctca

SEQ ID NO: 30732 - protein, 127 aa, synthetic construct
  REGION 1..127: note = Description of Artificial Sequence: Synthetic polypeptide
QVQLVESGGGVVQPGRSLRLSCAASGFTFSSYGMHWVRQAPGKGLEWLAVIWYDGSYKYYADSVKGRFTISRDNSKNTLYLQMNSLRAEDTAVYYCAREDSPYSGYALDYFYGMDVWGQGTTVTVSS

SEQ ID NO: 30733 - DNA, 360 bp, synthetic construct
  misc_feature 1..360: note = Description of Artificial Sequence: Synthetic polynucleotide
  source 1..360: mol_type = other DNA
caggtgcagctggtggagtctgggggaggcgtggtccagcctgggaggtccctgagactctcctgtgcagcgtctggattcaccttcagtagctatggcatgcactgggtccgccaggctccaggcaaggggctggagtgggtggcagttatatggtatgatggaagtaataaaaactatgcagactccgtgaagggccgattcaccatctccagagacaattccaagaacatgttgtatctgcaaatgaacagcctgagagccgaggaaacggctgtgtattactgtgcgagagatcgtggggttggctactacggtatggacgtctggggccaagggaccacggtcaccgtctcctca

SEQ ID NO: 30734 - protein, 120 aa, synthetic construct
  REGION 1..120: note = Description of Artificial Sequence: Synthetic polypeptide
QVQLVESGGGVVQPGRSLRLSCAASGFTFSSYGMHWVRQAPGKGLEWVAVIWYDGSNKNYADSVKGRFTISRDNSKNMLYLQMNSLRAEETAVYYCARDRGVGYYGMDVWGQGTTVTVSS

SEQ ID NO: 30735 - DNA, 363 bp, synthetic construct
  misc_feature 1..363: note = Description of Artificial Sequence: Synthetic polynucleotide
  source 1..363: mol_type = other DNA
gaggtgcagctgttggaatctgggggagacttaatacagcctggggggtccctgagactctcctgtgcagcctctggattcacctttagcagctctgccatgagctgggtccgccaggctccagggaaggggctggagtgggtctcagccattagtggtagtggtggtaacacattctacgcagactccgtgaagggccggttcaccatctccagagacaattccaagaacacgctgtatctgcaaatgaacagcctgagagccgaagacacggccgtttattactgtgcgaaactcatagcagtagttgggtcccactactttgactactggggccagggaaccctggtcaccgtctcctca

SEQ ID NO: 30736 - protein, 121 aa, synthetic construct
  REGION 1..121: note = Description of Artificial Sequence: Synthetic polypeptide
EVQLLESGGDLIQPGGSLRLSCAASGFTFSSSAMSWVRQAPGKGLEWVSAISGSGGNTFYADSVKGRFTISRDNSKNTLYLQMNSLRAEDTAVYYCAKLIAVVGSHYFDYWGQGTLVTVSS

SEQ ID NO: 30737 - DNA, 381 bp, synthetic construct
  misc_feature 1..381: note = Description of Artificial Sequence: Synthetic polynucleotide
  source 1..381: mol_type = other DNA
caggtgcagctgcaggagtcgggcccaggactggtgaagccttcacagaccctgtccctcacctgcactgtctctggtggctccatcagcagtggtgattactactggaactggatccgccagcacccagggaagggcctggaatggattgggttcatcttttacagtgggagcacctactacaacccgtccctcaagagtcgagttaccatatcagtagacacgtctaagaaccagttctccctgaagctgagctctgtgactgtcgcggacacggccgtgtattactgtgcgagaggggattacgatggttcggggagttatcaccactactacggtatggacgtctggggccaagggaccacggtcaccgtctcctca

SEQ ID NO: 30738 - protein, 127 aa, synthetic construct
  REGION 1..127: note = Description of Artificial Sequence: Synthetic polypeptide
QVQLQESGPGLVKPSQTLSLTCTVSGGSISSGDYYWNWIRQHPGKGLEWIGFIFYSGSTYYNPSLKSRVTISVDTSKNQFSLKLSSVTVADTAVYYCARGDYDGSGSYHHYYGMDVWGQGTTVTVSS

SEQ ID NO: 30739 - DNA, 360 bp, synthetic construct; identical to SEQ ID NO: 30627
  misc_feature 1..360: note = Description of Artificial Sequence: Synthetic polynucleotide
  source 1..360: mol_type = other DNA

SEQ ID NO: 30740 - protein, 120 aa, synthetic construct; identical to SEQ ID NO: 30628
  REGION 1..120: note = Description of Artificial Sequence: Synthetic polypeptide

SEQ ID NO: 30741 - DNA, 381 bp, synthetic construct
  misc_feature 1..381: note = Description of Artificial Sequence: Synthetic polynucleotide
  source 1..381: mol_type = other DNA
caggtgcagctgcaggagtcgggcccaggactggtgaagccttcacagaccctgtccctcacctgcactgtctctggtggctccatcagcagtgttagttactactggagctggatccgccagcgcccagggaagggcctggagtggattgggaacctctattacagtgggagcacctactacaacccgtccctcaggagtcgagctaccatatcagtagacacgtctaagaaccagttctccctgaagctgagttctgtgactgccgcggacacggccgtgtattactgtacgagaggggattacgatggttcggggagttatcactactaccacggtatggacgtctggggccaagggaccacggtcaccgtctcctca

SEQ ID NO: 30742 - protein, 127 aa, synthetic construct
  REGION 1..127: note = Description of Artificial Sequence: Synthetic polypeptide
QVQLQESGPGLVKPSQTLSLTCTVSGGSISSVSYYWSWIRQRPGKGLEWIGNLYYSGSTYYNPSLRSRATISVDTSKNQFSLKLSSVTAADTAVYYCTRGDYDGSGSYHYYHGMDVWGQGTTVTVSS

SEQ ID NO: 30743 - DNA, 360 bp, synthetic construct
  misc_feature 1..360: note = Description of Artificial Sequence: Synthetic polynucleotide
  source 1..360: mol_type = other DNA
caggtgcagctggtggagtctgggggaggcgtggtccagcctgggaggtccctgagactctcctgtgcagcgtctggattcaccttcagtagttatggcatgcactgggtccgccaggctccaggcaaggggctggagtgggtggcagttatatggtatgatggaagtaacaaaaactatgtagactccgtgaggggccgattcaccatctccagagacaactccaagaacacgctgtatctgcaaatgaacagcctgagagccgaggacacggctgtgtattattgtgcgagagatagaagcgtcggctacgacggtatggacgtctggggccaagggaccacggtcaccgtctcctca

SEQ ID NO: 30744 - protein, 120 aa, synthetic construct
  REGION 1..120: note = Description of Artificial Sequence: Synthetic polypeptide
QVQLVESGGGVVQPGRSLRLSCAASGFTFSSYGMHWVRQAPGKGLEWVAVIWYDGSNKNYVDSVRGRFTISRDNSKNTLYLQMNSLRAEDTAVYYCARDRSVGYDGMDVWGQGTTVTVSS

SEQ ID NO: 30745 - DNA, 360 bp, synthetic construct
  misc_feature 1..360: note = Description of Artificial Sequence: Synthetic polynucleotide
  source 1..360: mol_type = other DNA
caggtgcagttggtggagtctgggggaggcgtggtccagcctgggaggtccctgagactctcctgtgcagcgtctggattcaccttcagtagctatggcatgcactgggtccgccaggctccaggcaaggggctggagtgggtggcagttatatggtatgatggaagcaataaaaactatgcagactccgtgaagggccgattcaccatctccagagacaattccaagaacacgctgtatctgcaaatgaacagcctgagagccgaggacacggctgtgtattactgtgcgagagatcaaggtgtggggtactacggtatggacgtctggggccaagggaccacggtcaccgtctcctca

SEQ ID NO: 30746 - protein, 120 aa, synthetic construct
  REGION 1..120: note = Description of Artificial Sequence: Synthetic polypeptide
QVQLVESGGGVVQPGRSLRLSCAASGFTFSSYGMHWVRQAPGKGLEWVAVIWYDGSNKNYADSVKGRFTISRDNSKNTLYLQMNSLRAEDTAVYYCARDQGVGYYGMDVWGQGTTVTVSS

SEQ ID NO: 30747 - DNA, 363 bp, synthetic construct
  misc_feature 1..363: note = Description of Artificial Sequence: Synthetic polynucleotide
  source 1..363: mol_type = other DNA
caggtgcagctgcaggagtcgggcccaggactggtgaagccttcacagaccctgtccctcacctgcactgtctctggtgactccatcaataatggtggatactactggagctggatccgccagcacccagggaagggcctggagtggattggatacatcttttacagcgggagcacctactacaacccgtccctcaagagtcgagttaccatatcagttgacacgtctaagaatcagttctccctgaaactgaactctgtgactgccgcggacacggccgtgtatttttgtgcgagagcgggatataactgggacaacgggtttgactactggggccagggaaccctggtcaccgtctcctca

SEQ ID NO: 30748 - protein, 121 aa, synthetic construct
  REGION 1..121: note = Description of Artificial Sequence: Synthetic polypeptide
QVQLQESGPGLVKPSQTLSLTCTVSGDSINNGGYYWSWIRQHPGKGLEWIGYIFYSGSTYYNPSLKSRVTISVDTSKNQFSLKLNSVTAADTAVYFCARAGYNWDNGFDYWGQGTLVTVSS

SEQ ID NO: 30749 - DNA, 369 bp, synthetic construct
  misc_feature 1..369: note = Description of Artificial Sequence: Synthetic polynucleotide
  source 1..369: mol_type = other DNA
caggtgcagctggtggagtctgggggaggcgtggtccagcctgggaggtccctgagactctcctgtgcagcgtctggattcaccttcagtagctttatcatgcactgggtccgccaggctccaggcagggggctggagtgggtggcagttatatggtatgatggaagtaataaatactatgtagactccgtgaagggccgattcaccatctccagagacaattccaagaacacgctgtatctgcaaatgaacagcctgagagccgaggacacggctgtgtactactgtgcgagagaggagtatagtagcggctggttcgggtacggtatggacgtctggggccaagggaccacggtcaccgtctcctca

SEQ ID NO: 30750 - protein, 123 aa, synthetic construct
  REGION 1..123: note = Description of Artificial Sequence: Synthetic polypeptide
QVQLVESGGGVVQPGRSLRLSCAASGFTFSSFIMHWVRQAPGRGLEWVAVIWYDGSNKYYVDSVKGRFTISRDNSKNTLYLQMNSLRAEDTAVYYCAREEYSSGWFGYGMDVWGQGTTVTVSS

SEQ ID NO: 30751 - DNA, 360 bp, synthetic construct
  misc_feature 1..360: note = Description of Artificial Sequence: Synthetic polynucleotide
  source 1..360: mol_type = other DNA
caggtgcagctggtggagtctgggggaggcgtggtccagcctgggaggtccctgagactctcctgtgcagcgtctggattcaccttcagtagctatggcatgcactgggtccgccaggctccaggcaaggggctggagtgggtggcagttttatggtatgatggaactaataaaaactatgcagactccgtgaagggccgattcaccatctccagagacaattccaagaacacgctgtatctgcaaatgaacagcctgagagccgaggacacggctgtgtattactgtgcgagagatcagggcgtgggctacgacggtttggacgtctggggccaagggaccacggtcaccgtctcctca

SEQ ID NO: 30752 - protein, 120 aa, synthetic construct
  REGION 1..120: note = Description of Artificial Sequence: Synthetic polypeptide
QVQLVESGGGVVQPGRSLRLSCAASGFTFSSYGMHWVRQAPGKGLEWVAVLWYDGTNKNYADSVKGRFTISRDNSKNTLYLQMNSLRAEDTAVYYCARDQGVGYDGLDVWGQGTTVTVSS

SEQ ID NO: 30753 - DNA, 360 bp, synthetic construct
  misc_feature 1..360: note = Description of Artificial Sequence: Synthetic polynucleotide
  source 1..360: mol_type = other DNA
caggtgcagctggtggagtctgggggaggcgtggtccagcctgggaggtccctgagactctcctgtgcagcctctggattcaccttcagtagctatggcatgcactgggtccgccaggctccaggcaaggggctggagtgggtgacagttatatcatatgatggaggttataaaaactatgcagactccgtgaagggccgattcaccatctccagagacaattccaagaacacgctgtatctgcaaatgaatagcctgagagctgaggacacggctgtgtattactgtgcgagaggtacccacgggtactactacggtgtggacgtctggggccaagggaccacggtcaccgtctcctca

SEQ ID NO: 30754 - protein, 120 aa, synthetic construct
  REGION 1..120: note = Description of Artificial Sequence: Synthetic polypeptide
QVQLVESGGGVVQPGRSLRLSCAASGFTFSSYGMHWVRQAPGKGLEWVTVISYDGGYKNYADSVKGRFTISRDNSKNTLYLQMNSLRAEDTAVYYCARGTHGYYYGVDVWGQGTTVTVSS

SEQ ID NO: 30755 - DNA, 360 bp, synthetic construct
  misc_feature 1..360: note = Description of Artificial Sequence: Synthetic polynucleotide
  source 1..360: mol_type = other DNA
caggtgcagctggtggagtctgggggaggcgtggtccagcctgggaggtccctgagactctcctgtgcagcgtctggattcaccttcagtagctatggcatgcactgggtccgccaggctccaggcaaggggctggagtgggtggcagttatatggtatgatggaagtaatgaacactatgcagactccgtgaagggccgattcatgatctccagagacaattccaagaacacgctgtatctgcaaatgaacagcctgagagccgaggacacggctgtgtattactgtgcgagagataggggagtgggttactacggtatggacgtctggggccaagggaccacggtcaccgtctcctca

SEQ ID NO: 30756 - protein, 120 aa, synthetic construct
  REGION 1..120: note = Description of Artificial Sequence: Synthetic polypeptide
QVQLVESGGGVVQPGRSLRLSCAASGFTFSSYGMHWVRQAPGKGLEWVAVIWYDGSNEHYADSVKGRFMISRDNSKNTLYLQMNSLRAEDTAVYYCARDRGVGYYGMDVWGQGTTVTVSS

SEQ ID NO: 30757 - DNA, 345 bp, synthetic construct
  misc_feature 1..345: note = Description of Artificial Sequence: Synthetic polynucleotide
  source 1..345: mol_type = other DNA
caggtgcagctacagcagtggggcgcaggactgttgaagccttcggagaccctgtccctcacctgcgctgtctatggtgggtccttcagtggttgctactggagctggatccgccagcccccagggaaggggctggagtggattggggaaatcaatcaaagtggaaggtccaactacaacccgtccctcaagagtcgagtcaccatttcagtagacacgtccacgaaccagttctccctgaagctgagatctgtgaccgccgcggacacggctgtgtattactgtgcgagagactacggtgtctttgactactggggccagggcaccctggtcaccgtctcctca

SEQ ID NO: 30758 - protein, 115 aa, synthetic construct
  REGION 1..115: note = Description of Artificial Sequence: Synthetic polypeptide
QVQLQQWGAGLLKPSETLSLTCAVYGGSFSGCYWSWIRQPPGKGLEWIGEINQSGRSNYNPSLKSRVTISVDTSTNQFSLKLRSVTAADTAVYYCARDYGVFDYWGQGTLVTVSS

SEQ ID NO: 30759 - DNA, 360 bp, synthetic construct; identical to SEQ ID NO: 30601
  misc_feature 1..360: note = Description of Artificial Sequence: Synthetic polynucleotide
  source 1..360: mol_type = other DNA

SEQ ID NO: 30760 - protein, 120 aa, synthetic construct; identical to SEQ ID NO: 30602
  REGION 1..120: note = Description of Artificial Sequence: Synthetic polypeptide

SEQ ID NO: 30761 - DNA, 360 bp, synthetic construct
  misc_feature 1..360: note = Description of Artificial Sequence: Synthetic polynucleotide
  source 1..360: mol_type = other DNA
cagctgcagctgcaggagtcgggcccaggactggtgaagccttcggagaccctgtccctcacctgcactgtctctggtggctccatcagaagctaccactggagctggatccggcagcccgccgggaagggactggagtggattgggcttatctataccagtaggagcaccaattacaacccctccctcaagagtcgagtcaccatgtcagttgacacgtccaagaaccagttctccctgaagctgaactctgtgaccgccgcggacacggccgtgtattactgtgcgagactccggtataactggaacttcccttactttgactactggggccagggaaccctggtcaccgtctcctca

SEQ ID NO: 30762 - protein, 120 aa, synthetic construct; identical to SEQ ID NO: 30636
  REGION 1..120: note = Description of Artificial Sequence: Synthetic polypeptide

SEQ ID NO: 30763 - DNA, 360 bp, synthetic construct
  misc_feature 1..360: note = Description of Artificial Sequence: Synthetic polynucleotide
  source 1..360: mol_type = other DNA
caggtgcagctggtggagtctgggggaggcgtggtccagcctgggaggtccctgagactctcctgtgcatcgtctggattcaccttcaggaactatggcatgcactgggtccgccaggctccaggcaaggggctgaaatgggtggcagttatatggtttgatggaagtaatgactactatgcagactccgtgaagggccgattcaccatctccagagacaattccaagaacacgctgtcactgcaaatgaacagcctgagagccgaggacacggctgtgtattactgtgcgagagatagaagcgtcggctacgacggtttagatgtctggggccaagggaccacggtcaccgtctcctca

SEQ ID NO: 30764 - protein, 120 aa, synthetic construct
  REGION 1..120: note = Description of Artificial Sequence: Synthetic polypeptide
QVQLVESGGGVVQPGRSLRLSCASSGFTFRNYGMHWVRQAPGKGLKWVAVIWFDGSNDYYADSVKGRFTISRDNSKNTLSLQMNSLRAEDTAVYYCARDRSVGYDGLDVWGQGTTVTVSS

SEQ ID NO: 30765 - DNA, 363 bp, synthetic construct
  misc_feature 1..363: note = Description of Artificial Sequence: Synthetic polynucleotide
  source 1..363: mol_type = other DNA
gaggtgcagctgttggagtctgggggaggcttggtacagcctggggggtccctgagactctcctgttcagcctctggattcacctttagcagctatgccatgagctgggtccgccaggctccagggaaggggctggagtgggtctcagctattagtggtagaggcggtagtacattctacgcagactccgtgaagggccggttcaccatctccagagacaattccaagaacacgctgtatctgcaaatgaacagcctgagagccgaggacacggccgtctattactgtgcgcgacgtttagcactggatggctatgatgcttttgatatctggggccaagggacaatggtcaccgtctcttca

SEQ ID NO: 30766 - protein, 121 aa, synthetic construct
  REGION 1..121: note = Description of Artificial Sequence: Synthetic polypeptide
EVQLLESGGGLVQPGGSLRLSCSASGFTFSSYAMSWVRQAPGKGLEWVSAISGRGGSTFYADSVKGRFTISRDNSKNTLYLQMNSLRAEDTAVYYCARRLALDGYDAFDIWGQGTMVTVSS

SEQ ID NO: 30767 - DNA, 360 bp, synthetic construct; identical to SEQ ID NO: 30655
  misc_feature 1..360: note = Description of Artificial Sequence: Synthetic polynucleotide
  source 1..360: mol_type = other DNA

SEQ ID NO: 30768 - protein, 120 aa, synthetic construct; identical to SEQ ID NO: 30656
  REGION 1..120: note = Description of Artificial Sequence: Synthetic polypeptide

SEQ ID NO: 30769 - DNA, 381 bp, synthetic construct
  misc_feature 1..381: note = Description of Artificial Sequence: Synthetic polynucleotide
  source 1..381: mol_type = other DNA
caggtgcagctgcaggagtcgggcccaggactggtgaagccttcacagaccctgtccctcacctgcactgtctctggtggctccatcagcagtggtgtttaccactggagctggatccgccagcacccagggaagggcctggagtggattgggaacatccattacagcgggagcacctacaacaacccgtccctcaagagtcgagttaccatatcagtagacacgtctaagaaccagttctccctgaagctgagctctgtgactgccgcggacacggccgtgtattactgtgcgagaggggattacgatggttcggggagttatcactactactacggtatggacgtctggggccaagggaccacggtcaccgtctcctca

SEQ ID NO: 30770 - protein, 127 aa, synthetic construct
  REGION 1..127: note = Description of Artificial Sequence: Synthetic polypeptide
QVQLQESGPGLVKPSQTLSLTCTVSGGSISSGVYHWSWIRQHPGKGLEWIGNIHYSGSTYNNPSLKSRVTISVDTSKNQFSLKLSSVTAADTAVYYCARGDYDGSGSYHYYYGMDVWGQGTTVTVSS

SEQ ID NO: 30771 - DNA, 381 bp, synthetic construct
  misc_feature 1..381: note = Description of Artificial Sequence: Synthetic polynucleotide
  source 1..381: mol_type = other DNA
caggtgcagctgcaggagtcgggcccaggactggtgaagccttcacagaccctgtccctcacctgcactgtctctggtggctccatcagcagtggtgtttactactggagctggatccgccagcacccagggaagggcctggagtggattgggaacatctattacagtgggagcacctacaacaacccgtccctcaagagtcgacttaccatatcagcagacacgtctaagaaccagttctccctgaagctgagctctgtgactgccgcggacacggccgtgtattactgtgcgagaggggattacgatggttcggggagttatcactactactacggtatggacgtctggggccaagggaccacggtcaccgtctcctca

SEQ ID NO: 30772 - protein, 127 aa, synthetic construct
  REGION 1..127: note = Description of Artificial Sequence: Synthetic polypeptide
QVQLQESGPGLVKPSQTLSLTCTVSGGSISSGVYYWSWIRQHPGKGLEWIGNIYYSGSTYNNPSLKSRLTISADTSKNQFSLKLSSVTAADTAVYYCARGDYDGSGSYHYYYGMDVWGQGTTVTVSS

SEQ ID NO: 30773 - DNA, 381 bp, synthetic construct
  misc_feature 1..381: note = Description of Artificial Sequence: Synthetic polynucleotide
  source 1..381: mol_type = other DNA
caggtgcagctgcaggagtcgggcccaggactggtgaagccttcacagaccctgtccctcacctgcactgtctctggtggctccatcagcagtggtgtttactactggagctggatccgccagcacccagggaagggcctggagtggattgggaacatctattacagtgggagcacctacaacaacccgtccctcaagagtcgagttaccatatcagtagacacgtctaagaaccagttctccctgaagctgagctctgtgactgccgcggacacggccgtgtattactgtgcgagaggggattacgatggttcggggagttatcactactactacggtatggacgtctggggccaagggaccacggtcaccgtctcctca

SEQ ID NO: 30774 - protein, 127 aa, synthetic construct
  REGION 1..127: note = Description of Artificial Sequence: Synthetic polypeptide
QVQLQESGPGLVKPSQTLSLTCTVSGGSISSGVYYWSWIRQHPGKGLEWIGNIYYSGSTYNNPSLKSRVTISVDTSKNQFSLKLSSVTAADTAVYYCARGDYDGSGSYHYYYGMDVWGQGTTVTVSS

SEQ ID NO: 30775 - DNA, 360 bp, synthetic construct
  misc_feature 1..360: note = Description of Artificial Sequence: Synthetic polynucleotide
  source 1..360: mol_type = other DNA
gaggtgcagctgttggagtctgggggaggcttggtacagcctggggggtccctgagactctcctgtgcagcctctggattcacctttagcacctttgccatgagttgggtccgccaggctccagggaaggggctggagtgggtctcagctattagtcgtagtggtggtaacacacactacgcagactccgtgaagggccggttcaccatctccagagacaattccaagaatacgctgtatctgcaaatgaacagcctgagagccgaggacacggccgtatattcctgtgcgaaagatggattcggtgggagctcctactttgactactggggccagggaaccctggtcaccgtctcctca

SEQ ID NO: 30776 - protein, 120 aa, synthetic construct
  REGION 1..120: note = Description of Artificial Sequence: Synthetic polypeptide
EVQLLESGGGLVQPGGSLRLSCAASGFTFSTFAMSWVRQAPGKGLEWVSAISRSGGNTHYADSVKGRFTISRDNSKNTLYLQMNSLRAEDTAVYSCAKDGFGGSSYFDYWGQGTLVTVSS

SEQ ID NO: 30777 - DNA, 381 bp, synthetic construct
  misc_feature 1..381: note = Description of Artificial Sequence: Synthetic polynucleotide
  source 1..381: mol_type = other DNA
caggtgcagctgcaggagtcgggcccaggactggtgaagccttcacagaccctgtccctcacctgcactgtctctggtggctccatcagcagtggtgattactactggaactggatccgccagctcccagggaagggcctggagtggattgggtacatcttttacagtgggagcacctactacaacccgtccctcaagagtcgacttaccatatcagtggacacgtctaagaaccagttctccctgaagctgagctctgtgactgccgcggacacggccgtgtattactgtacaaggggggattacgatggttcggggagttatcacttctactacggtatggacgtctggggccaagggaccacggtcaccgtctcctca

SEQ ID NO: 30778 - protein, 127 aa, synthetic construct
  REGION 1..127: note = Description of Artificial Sequence: Synthetic polypeptide
QVQLQESGPGLVKPSQTLSLTCTVSGGSISSGDYYWNWIRQLPGKGLEWIGYIFYSGSTYYNPSLKSRLTISVDTSKNQFSLKLSSVTAADTAVYYCTRGDYDGSGSYHFYYGMDVWGQGTTVTVSS

SEQ ID NO: 30779 - DNA, 381 bp, synthetic construct; identical to SEQ ID NO: 30717
  misc_feature 1..381: note = Description of Artificial Sequence: Synthetic polynucleotide
  source 1..381: mol_type = other DNA

SEQ ID NO: 30780 - protein, 127 aa, synthetic construct; identical to SEQ ID NO: 30718
  REGION 1..127: note = Description of Artificial Sequence: Synthetic polypeptide

SEQ ID NO: 30781 - DNA, 363 bp, synthetic construct
  misc_feature 1..363: note = Description of Artificial Sequence: Synthetic polynucleotide
  source 1..363: mol_type = other DNA
gaggtgcagctgttggagtctgggggaggcttggcacagcctggggggtccctgagactctcctgtgcagcctctggattcacctttagcagctatgccatgaactgggtccgccaggctccagggaaggggctggagtgggtctcagctattattggtaatggtggtagaacatactacgcagactccgtgaagggccggttctccatctccagagacaattccaagaacacgctgtttctgcaaatgaacagcctgagagccgaggacacggccgtatattactgtgcgaaagatctgggtagatacagctatggtttctttgactactggggccagggaaccctggtcaccgtctcctca

SEQ ID NO: 30782 - protein, 121 aa, synthetic construct
  REGION 1..121: note = Description of Artificial Sequence: Synthetic polypeptide
EVQLLESGGGLAQPGGSLRLSCAASGFTFSSYAMNWVRQAPGKGLEWVSAIIGNGGRTYYADSVKGRFSISRDNSKNTLFLQMNSLRAEDTAVYYCAKDLGRYSYGFFDYWGQGTLVTVSS

SEQ ID NO: 30783 - DNA, 354 bp, synthetic construct
  misc_feature 1..354: note = Description of Artificial Sequence: Synthetic polynucleotide
  source 1..354: mol_type = other DNA
caggtgcagctggtgcagtctggggctgaggtgaagaagcctggggcctcagtgaaggtctcctgcaaggcttctggatacaccttcaccaattatgatatcaactgggtgcgacaggccactggacaagggcttgagtggatgggatggatgaaccctaacagtggtaacacaggctatgcacagaagttccagggcagagtcaccatgaccaggaacacctccataagaacagcctacatggagctgaacagcctgagatctgaggacacggccgtgtattactgtgcgagtagcagtggctggtacttctttgactactggggccagggaaccctggtcaccgtctcctca

SEQ ID NO: 30784 - protein, 118 aa, synthetic construct
  REGION 1..118: note = Description of Artificial Sequence: Synthetic polypeptide
QVQLVQSGAEVKKPGASVKVSCKASGYTFTNYDINWVRQATGQGLEWMGWMNPNSGNTGYAQKFQGRVTMTRNTSIRTAYMELNSLRSEDTAVYYCASSSGWYFFDYWGQGTLVTVSS

SEQ ID NO: 30785 - DNA, 366 bp, synthetic construct; identical to SEQ ID NO: 28153
  misc_feature 1..366: note = Description of Artificial Sequence: Synthetic polynucleotide
  source 1..366: mol_type = other DNA

SEQ ID NO: 30786 - protein, 122 aa, synthetic construct; identical to SEQ ID NO: 28154
  REGION 1..122: note = Description of Artificial Sequence: Synthetic polypeptide

SEQ ID NO: 30787 - DNA, 363 bp, synthetic construct
  misc_feature 1..363: note = Description of Artificial Sequence: Synthetic polynucleotide
  source 1..363: mol_type = other DNA
caggtgcagctgcaggagtcgggcccaggactggtgaagccttcacagaccctgtccctcacctgcactgtctctggtggctccatcagcagtggtggttactactggagctggatccgccagcacccagggaagggcctggagtggattgggtacatctattacagtgggagcacctactacaacccgtccctcaagagtcgagttaccatatcagtagacacgtctaagaaccagttctccctgaagctgagctctgtggctgccgcggacacggccgtgtattattgtgcgagaggagagtataactggaaccacggtatggacgtctggggccaagggaccacggtcaccgtctcctca

SEQ ID NO: 30788 - protein, 121 aa, synthetic construct
  REGION 1..121: note = Description of Artificial Sequence: Synthetic polypeptide
QVQLQESGPGLVKPSQTLSLTCTVSGGSISSGGYYWSWIRQHPGKGLEWIGYIYYSGSTYYNPSLKSRVTISVDTSKNQFSLKLSSVAAADTAVYYCARGEYNWNHGMDVWGQGTTVTVSS

SEQ ID NO: 30789 - DNA, 345 bp, synthetic construct
  misc_feature 1..345: note = Description of Artificial Sequence: Synthetic polynucleotide
  source 1..345: mol_type = other DNA
caggtgcagctacagcagtggggcgcaggactgttgaagccttcggagaccctgtccctcacctgcgctgtctttggtgggtccttcagtggtccctactggagttggatccgccagcccccagggaaggggctggagtggattggggaatccaatcatagtggacgcaccaactacaacccgtccctcaagagtcgagtcaccatatcagtggacacgtccaagaaccagttctccctgaggctgagctctgtgaccgccgcggacacggctgtgtattactgtgcgagagactacggtggtttggactactggggccagggaaccctggtcaccgtctcctca

SEQ ID NO: 30790 - protein, 115 aa, synthetic construct
  REGION 1..115: note = Description of Artificial Sequence: Synthetic polypeptide
QVQLQQWGAGLLKPSETLSLTCAVFGGSFSGPYWSWIRQPPGKGLEWIGESNHSGRTNYNPSLKSRVTISVDTSKNQFSLRLSSVTAADTAVYYCARDYGGLDYWGQGTLVTVSS

SEQ ID NO: 30791 - DNA, 381 bp, synthetic construct; identical to SEQ ID NO: 30717
  misc_feature 1..381: note = Description of Artificial Sequence: Synthetic polynucleotide
  source 1..381: mol_type = other DNA

SEQ ID NO: 30792 - protein, 127 aa, synthetic construct; identical to SEQ ID NO: 30718
  REGION 1..127: note = Description of Artificial Sequence: Synthetic polypeptide

SEQ ID NO: 30793 - DNA, 360 bp, synthetic construct
  misc_feature 1..360: note = Description of Artificial Sequence: Synthetic polynucleotide
  source 1..360: mol_type = other DNA
caggtgcagctggtggagtctgggggaggcgtggtccagcctgggaggtccctgagactctcctgtgcagcgtctggattcaccttcagtagctatggcatgcactgggtccgccaggctccaggcaaggggctggagtgggtggcagttatatggtatgatggaagtaataaaaactacgcagactccgtgaagggccgattcaccatctccagagacaattccaagaacacgctgtatctgcaaatgaacagcctgagagccgaggacacggctatgtattactgtgcgagagatcagggcgtgggctacgacggcttggacgtctggggccaagggacctcggtcaccgtctcctca

SEQ ID NO: 30794 - protein, 120 aa, synthetic construct; identical to SEQ ID NO: 30656
  REGION 1..120: note = Description of Artificial Sequence: Synthetic polypeptide

SEQ ID NO: 30795 - DNA, 342 bp, synthetic construct
  misc_feature 1..342: note = Description of Artificial Sequence: Synthetic polynucleotide
  source 1..342: mol_type = other DNA
caggtgcagctacagcagtggggcgcaggactgttgaagccttcggagaccctgtccctcacctgcgctgtctatggtgggtccttcagtggttacttctggacctggatccgccagcccccagggaaggggctggagtggattggggaaatcaatcatagtggaagcaccaactacaacccgtccctcaagagtcgcgtcaccatatcagtagacacgtccaagaaccagttctccctgaagctgagctctgtgaccgccgcggacacggctgtgtattactgtgcgagagactacggtgctgactactggggccagggaaccctggtcgccgtctccgca

SEQ ID NO: 30796 - protein, 114 aa, synthetic construct
  REGION 1..114: note = Description of Artificial Sequence: Synthetic polypeptide
QVQLQQWGAGLLKPSETLSLTCAVYGGSFSGYFWTWIRQPPGKGLEWIGEINHSGSTNYNPSLKSRVTISVDTSKNQFSLKLSSVTAADTAVYYCARDYGADYWGQGTLVAVSA

SEQ ID NO: 30797 - DNA, 381 bp, synthetic construct; identical to SEQ ID NO: 30629
  misc_feature 1..381: note = Description of Artificial Sequence: Synthetic polynucleotide
  source 1..381: mol_type = other DNA

SEQ ID NO: 30798 - protein, 127 aa, synthetic construct; identical to SEQ ID NO: 30630
  REGION 1..127: note = Description of Artificial Sequence: Synthetic polypeptide

SEQ ID NO: 30799 - DNA, 381 bp, synthetic construct
  misc_feature 1..381: note = Description of Artificial Sequence: Synthetic polynucleotide
  source 1..381: mol_type = other DNA
caggtgcagctgcaggagtcgggcccaggactggtgaagccttcacagaccctgtccctcacctgcactgtctctggtggctccatcaacagtggtggttactactggaactggatccgccagcacccagggaagggcctggagtggattgggttcatcttttacagtgggagcacctactacaacccgtccctcaagagtcgagtttccatatcagtagacacgtctaagaaccagttctccctgaagctgagctctgtgactgccgcggacacggccgtgtattactgtgcgagaggggattacgatggttcggggagttatcactactattacggtatggacgtctggggccaggggaccacggtcaccgtctcctca

SEQ ID NO: 30800 - protein, 127 aa, synthetic construct
  REGION 1..127: note = Description of Artificial Sequence: Synthetic polypeptide
QVQLQESGPGLVKPSQTLSLTCTVSGGSINSGGYYWNWIRQHPGKGLEWIGFIFYSGSTYYNPSLKSRVSISVDTSKNQFSLKLSSVTAADTAVYYCARGDYDGSGSYHYYYGMDVWGQGTTVTVSS

SEQ ID NO: 30801 - DNA, 381 bp, synthetic construct
  misc_feature 1..381: note = Description of Artificial Sequence: Synthetic polynucleotide
  source 1..381: mol_type = other DNA
caggtgcagctggtggagtctgggggaggcgtggtccagcctgggaggtccctgagactctcctgtgcagcgtctggattcaccttcagtatctatggcatggactgggtccgccaggctccaggcaaggggctggagtgggtggcagttatatggtatgatggaagttataaatactatgcagactccgtgaagggccgattcaccatctccagagacaattccaagaacacgctgtatctgcaaatgaacagcctgagagccgaggacacggctgtgtattattgtgtgagagaggattccccttatagtggctacggcttggactactactacggtatggacgtctggggccaagggaccacggtcaccgtctcctca

SEQ ID NO: 30802 - protein, 127 aa, synthetic construct
  REGION 1..127: note = Description of Artificial Sequence: Synthetic polypeptide
QVQLVESGGGVVQPGRSLRLSCAASGFTFSIYGMDWVRQAPGKGLEWVAVIWYDGSYKYYADSVKGRFTISRDNSKNTLYLQMNSLRAEDTAVYYCVREDSPYSGYGLDYYYGMDVWGQGTTVTVSS

SEQ ID NO: 30803 - DNA, 381 bp, synthetic construct
  misc_feature 1..381: note = Description of Artificial Sequence: Synthetic polynucleotide
  source 1..381: mol_type = other DNA
caggtgcagctgcaggagaaaggcccaggactggtgaagccttcacagaccctgtccctcacctgcactgtctctggtggctccgtcagcagtggtgtttactactggagctggatccgccagcacccagggaagggcctggagtggattgggaacatctattacagtgggagcacctacaacaacccgtccctcaagagtcgagttaccatatcagtagacacgtctaagaaccagttctccctgaagctgaactctgtgactgccgcggacacggccgtctattactgtgcgcgaggggattacgatggttcggggagttatcacttctactacggtttggacgtctggggccatgggaccacggtcaccgtctcctca

SEQ ID NO: 30804 - protein, 127 aa, synthetic construct
  REGION 1..127: note = Description of Artificial Sequence: Synthetic polypeptide
QVQLQEKGPGLVKPSQTLSLTCTVSGGSVSSGVYYWSWIRQHPGKGLEWIGNIYYSGSTYNNPSLKSRVTISVDTSKNQFSLKLNSVTAADTAVYYCARGDYDGSGSYHFYYGLDVWGHGTTVTVSS

SEQ ID NO: 30805 - DNA, 363 bp, synthetic construct
  misc_feature 1..363: note = Description of Artificial Sequence: Synthetic polynucleotide
  source 1..363: mol_type = other DNA
caggtgcagctgcaggagtcgggcccaggactggtgaagccttcacagaccctgtccctcacctgcactgtctctggtgactccatcaataatggtggatactactggagctggatccgccagcacccagggaagggcctggagtggattgggtacatcttttacagcgggagcacctactacaacccgtccctcaagagtcgagttaccatatcagttgacacgtctaagaatcagttctccctgaagctgaactctgtgactgccgcggacacggccgtgtatttttgtgcgagagcgggatataactgggacaacgggtttgactactggggccagggaaccctggtcaccgtctcctca

SEQ ID NO: 30806 - protein, 121 aa, synthetic construct; identical to SEQ ID NO: 30748
  REGION 1..121: note = Description of Artificial Sequence: Synthetic polypeptide

SEQ ID NO: 30807 - DNA, 360 bp, synthetic construct; identical to SEQ ID NO: 30627
  misc_feature 1..360: note = Description of Artificial Sequence: Synthetic polynucleotide
  source 1..360: mol_type = other DNA

SEQ ID NO: 30808 - protein, 120 aa, synthetic construct; identical to SEQ ID NO: 30628
  REGION 1..120: note = Description of Artificial Sequence: Synthetic polypeptide

SEQ ID NO: 30809 - DNA, 348 bp, synthetic construct
  misc_feature 1..348: note = Description of Artificial Sequence: Synthetic polynucleotide
  source 1..348: mol_type = other DNA
gaggtgcagttggtggagtctgggggaggcctggtcaagcctggggggtccctgagactctcctgtgcagcctctggattcaccttcagggactatagcatgaactgggtccgccaggctccagggaaggggctggagtgggtctcatccattagtagtgctggtggttacatatactacgcagactcactgaagggccgattcaccatctccagagacaacgccaaaaactcactgtatctgcaaatgaacagcctgagagccgaggacacggctgtgtattactgtgcgagagcaactatggcccttgactactggggccagggaaccctggtcaccgtctcctca

SEQ ID NO: 30810 - protein, 116 aa, synthetic construct
  REGION 1..116: note = Description of Artificial Sequence: Synthetic polypeptide
EVQLVESGGGLVKPGGSLRLSCAASGFTFRDYSMNWVRQAPGKGLEWVSSISSAGGYIYYADSLKGRFTISRDNAKNSLYLQMNSLRAEDTAVYYCARATMALDYWGQGTLVTVSS

SEQ ID NO: 30811 - DNA, 381 bp, synthetic construct
  misc_feature 1..381: note = Description of Artificial Sequence: Synthetic polynucleotide
  source 1..381: mol_type = other DNA
caggtgcagctgcaggagtcgggcccaggactggtgaagccttcacagaccctgtccctcacctgcactgtctctggtggctccatcagcagtgctgattactactggaactggatccgccagctcccagggaagggcctggagtggattgggtacatcttttacagtgggagcacctactacaacccgtccctcaagagtcgacttaccatatcagtggacacgtctaagaaccagttctccctgaagctgagctctgtgactgccgcggacacggccgtgtattactgtgcgagaggggattacgatggttcggggagttatcacttctactacggtatggacgtctggggccaagggaccacggtcaccgtctcctca

SEQ ID NO: 30812 - protein, 127 aa, synthetic construct
  REGION 1..127: note = Description of Artificial Sequence: Synthetic polypeptide
QVQLQESGPGLVKPSQTLSLTCTVSGGSISSADYYWNWIRQLPGKGLEWIGYIFYSGSTYYNPSLKSRLTISVDTSKNQFSLKLSSVTAADTAVYYCARGDYDGSGSYHFYYGMDVWGQGTTVTVSS

SEQ ID NO: 30813 - DNA, 363 bp, synthetic construct
  misc_feature 1..363: note = Description of Artificial Sequence: Synthetic polynucleotide
  source 1..363: mol_type = other DNA
caggtgcagctggtggagtctgggggaggcgtggtccagcctgggaggtccctgagactctcctgtggagcgtctggattcaccttcagtagctatgccatgcactgggtccgccaggctccaggcaaggggctggagtgggtggcagttatatggtatgatggaactaataaatactatggagactccgtgaagggccgattcaccatctccagagacaattccaagaacacgctgaatctgcaaatgaacagcctgagagccgaggacacggctgtctattactgtgcgagagatttcactataactggagctacatattttgactactggggccagggaaccctggtcaccgtctcctca

SEQ ID NO: 30814 - protein, 121 aa, synthetic construct
  REGION 1..121: note = Description of Artificial Sequence: Synthetic polypeptide
QVQLVESGGGVVQPGRSLRLSCGASGFTFSSYAMHWVRQAPGKGLEWVAVIWYDGTNKYYGDSVKGRFTISRDNSKNTLNLQMNSLRAEDTAVYYCARDFTITGATYFDYWGQGTLVTVSS

SEQ ID NO: 30815 - DNA, 360 bp, synthetic construct
  misc_feature 1..360: note = Description of Artificial Sequence: Synthetic polynucleotide
  source 1..360: mol_type = other DNA
caggtgcagctggtggagtctgggggaggcgtggtccagcctgggaggtccctgagactctcctgtgcagcgtctggattcaccttcagtagctatggcatgcactgggtccgccaggctccaggcaaggggctggagtgggtggcagttatatggtatgatggaagtaatgaacactatgcagactccgtgaagggccgattcaccatctccagagacaattccaagaacacgctgtatctgcaaatgaacagcctgagagccgaggacacggctgtgtattactgtgcgagaaataggggggtgggttactacggtttggacgtctggggccaagggaccacggtcaccgtctcctca

SEQ ID NO: 30816 - protein, 120 aa, synthetic construct
  REGION 1..120: note = Description of Artificial Sequence: Synthetic polypeptide
QVQLVESGGGVVQPGRSLRLSCAASGFTFSSYGMHWVRQAPGKGLEWVAVIWYDGSNEHYADSVKGRFTISRDNSKNTLYLQMNSLRAEDTAVYYCARNRGVGYYGLDVWGQGTTVTVSS

SEQ ID NO: 30817 - DNA, 360 bp, synthetic construct
  misc_feature 1..360: note = Description of Artificial Sequence: Synthetic polynucleotide
  source 1..360: mol_type = other DNA
caggtgcagctgcaggagtcgggcccaggactggtgaagccttcggagaccctgtccctcacctgcactgtctctggtggctccatcaataattactactggagctggatccggcagcccgccgggaagggactggagtggattgggcgtatctatgccagtgggagcaccaactacaacccctccctcaagagtcgagtcaccatgtcaatagacacgtccaagaaccagttctccctgaagctgagctctgtgaccgccgcggacacggccgtgcattactgtgcgagagatcggggatactatggctactacggtatggacgtctggggccaagggaccacggtcaccatctcctca

SEQ ID NO: 30818 - protein, 120 aa, synthetic construct
  REGION 1..120: note = Description of Artificial Sequence: Synthetic polypeptide
QVQLQESGPGLVKPSETLSLTCTVSGGSINNYYWSWIRQPAGKGLEWIGRIYASGSTNYNPSLKSRVTMSIDTSKNQFSLKLSSVTAADTAVHYCARDRGYYGYYGMDVWGQGTTVTISS

SEQ ID NO: 30819 - DNA, 348 bp, synthetic construct
  misc_feature 1..348: note = Description of Artificial Sequence: Synthetic polynucleotide
  source 1..348: mol_type = other DNA
caggtgcagttggtgcaatctgggactgaggtgaagaagcctggggcctctttgaaggtctcctgcaaggcttctggatacaccttcaccgtctactatttgaactgggtgcgacaggcccctggacaagggcttgagtggatgggatggatcaaccctaacagtggtggcacaaactatgcacagaagtttcagggcagggtcaccatgaccagggacacgtccatcagcacagcctacatggaactgagcaggctgagatctgacgacacggccgtgtattactgtgcgagaggctacgatattttgactggttggggccagggaaccctggtcaccgtctcctca

SEQ ID NO: 30820 - protein, 116 aa, synthetic construct
  REGION 1..116: note = Description of Artificial Sequence: Synthetic polypeptide
QVQLVQSGTEVKKPGASLKVSCKASGYTFTVYYLNWVRQAPGQGLEWMGWINPNSGGTNYAQKFQGRVTMTRDTSISTAYMELSRLRSDDTAVYYCARGYDILTGWGQGTLVTVSS

SEQ ID NO: 30821 - DNA, 360 bp, synthetic construct
  misc_feature 1..360: note = Description of Artificial Sequence: Synthetic polynucleotide
  source 1..360: mol_type = other DNA
cagctgcagctgcaggagtcgggcccaggactggtgaagccttcggagaccctgtccctcacctgcactgtctctggtggctccatcagtagttaccactggagctggatccggcagcccgccgggaagggactggagtggattggacttatctataccagtaggagcaccaactacaacccctccctcaagagtcgagtcaccatgtcagtagacaggtccaagagccagttctccctgaagctgagctctgtgaccgccgcggacacggccgtgtattactgtgcgagactccggtataactggaacttcccttactttgactactggggccagggaaccctggtcaccgtctcctca

SEQ ID NO: 30822 - protein, 120 aa, synthetic construct
  REGION 1..120: note = Description of Artificial Sequence: Synthetic polypeptide
QLQLQESGPGLVKPSETLSLTCTVSGGSISSYHWSWIRQPAGKGLEWIGLIYTSRSTNYNPSLKSRVTMSVDRSKSQFSLKLSSVTAADTAVYYCARLRYNWNFPYFDYWGQGTLVTVSS

SEQ ID NO: 30823 - DNA, 381 bp, synthetic construct
  misc_feature 1..381: note = Description of Artificial Sequence: Synthetic polynucleotide
  source 1..381: mol_type = other DNA
caggtgcaactgcaggagtcgggcccaggactggtgaagccttcacagaccctgtccctcacctgcactgtctctggtggctccatcaacagtggtgattactactggaactggatccgccaccacccagggaagggcctggagtggattgggtacatcttttacagtgggagcacctactacaacccgtccctcaagagtcgagttaccatatcagtagacacgtctaagaaccagttctccctgaagctgagctctgtgactgccgcggacacggccgtatattactgtgcgagaggggattacgatggttcggggagttatcactactattacggtatggacgtctggggccaagggaccacggtcaccgtctcctca

SEQ ID NO: 30824 - protein, 127 aa, synthetic construct
  REGION 1..127: note = Description of Artificial Sequence: Synthetic polypeptide
QVQLQESGPGLVKPSQTLSLTCTVSGGSINSGDYYWNWIRHHPGKGLEWIGYIFYSGSTYYNPSLKSRVTISVDTSKNQFSLKLSSVTAADTAVYYCARGDYDGSGSYHYYYGMDVWGQGTTVTVSS

SEQ ID NO: 30825 - DNA, 381 bp, synthetic construct
  misc_feature 1..381: note = Description of Artificial Sequence: Synthetic polynucleotide
  source 1..381: mol_type = other DNA
caggtgcagctgcaggagtcgggcccaggactggtgaagccttcacagaccctgtccctcacctgcactgtctctggtgactccatcaacagtggtgattactactggaactggatccgccagcacccagggaagggcctggagtggattggattcatcttttacagtgggagcacctactacaacccgtccctcaagagtcgagttaccatatcaatagacacgtctaagaaccagttctccctgaagctgagctctgtgaatgtcgcggacacggccgtgtattactgtgcgagaggggattacgatggttcggggagttatcactactattacggtatggacgtctggggccaagggaccacggtcaccgtctcctca

SEQ ID NO: 30826 - protein, 127 aa, synthetic construct
  REGION 1..127: note = Description of Artificial Sequence: Synthetic polypeptide
QVQLQESGPGLVKPSQTLSLTCTVSGDSINSGDYYWNWIRQHPGKGLEWIGFIFYSGSTYYNPSLKSRVTISIDTSKNQFSLKLSSVNVADTAVYYCARGDYDGSGSYHYYYGMDVWGQGTTVTVSS

SEQ ID NO: 30827 - DNA, 360 bp, synthetic construct
  misc_feature 1..360: note = Description of Artificial Sequence: Synthetic polynucleotide
  source 1..360: mol_type = other DNA
caggtgcagctggtggagtctgggggaggcgtggtccagcctgggaggtccctgagactctcctgtgcagcgtctggattcaccttcagtagctatggcatgcactgggtccgccaggctccaggcaaggggctggagtgggtggcagttatatggtatgatggaagtaataaaaactatgcagactccgtgaagggccgattcaccatctccagagacaattccaagaacacgctgtatctgcaaatgaacagcctgagagccgaggacacggctgtgtattattgtgcgagagatcggtctaagggttacgacggtatggacgtctggggccaagggaccacggtcaccgtctcctca

SEQ ID NO: 30828 - protein, 120 aa, synthetic construct
  REGION 1..120: note = Description of Artificial Sequence: Synthetic polypeptide
QVQLVESGGGVVQPGRSLRLSCAASGFTFSSYGMHWVRQAPGKGLEWVAVIWYDGSNKNYADSVKGRFTISRDNSKNTLYLQMNSLRAEDTAVYYCARDRSKGYDGMDVWGQGTTVTVSS

SEQ ID NO: 30829 - DNA, 381 bp, synthetic construct
  misc_feature 1..381: note = Description of Artificial Sequence: Synthetic polynucleotide
  source 1..381: mol_type = other DNA
caggtgcagctggtgcagtctggggctgaggtgaagaagcctggggcctcagtgaaggtctcctgcaaggcttctggatacaccttcaccgactactacatacactgggtgcgacaggcccctggacaagggcttgagtggatgggatggatcaaccctaacaatggtggcacaaactatgcacagaaatttcagggcagggtcaccatgaccagggacacgtccatcagcacagcctacatggagctgagcaggctgagatctgacgacacggccgtgtattactgtgcgagagaaccccttggttactatggttcggggagttatggggcctacggtatggacgtctggggccaagggaccacggtcaccgtctcctca

SEQ ID NO: 30830 - protein, 127 aa, synthetic construct
  REGION 1..127: note = Description of Artificial Sequence: Synthetic polypeptide
QVQLVQSGAEVKKPGASVKVSCKASGYTFTDYYIHWVRQAPGQGLEWMGWINPNNGGTNYAQKFQGRVTMTRDTSISTAYMELSRLRSDDTAVYYCAREPLGYYGSGSYGAYGMDVWGQGTTVTVSS

SEQ ID NO: 30831 - DNA, 345 bp, synthetic construct
  misc_feature 1..345: note = Description of Artificial Sequence: Synthetic polynucleotide
  source 1..345: mol_type = other DNA
caggtgcagctacagcagtggggcgcaggactgttgaagccttcggagaccctgtccctcacctgcgctgtctctggtgggtccttcagatattactactggagctggatccgccagccccccgggaaggggctggagtggtttggggaaatcaatcatagtggaagcaccaactacaacccgtccctcaagagtcgagtcaccatatcaatagacacgtccaagaaccagttctccctgaagctgaggtctgtgaccgccgcggacacggctgtgtattactgtgcgagagactacggtgcttttgatatctggggccaagggacaatggtcaccgtctcttca

SEQ ID NO: 30832 - protein, 115 aa, synthetic construct
  REGION 1..115: note = Description of Artificial Sequence: Synthetic polypeptide
QVQLQQWGAGLLKPSETLSLTCAVSGGSFRYYYWSWIRQPPGKGLEWFGEINHSGSTNYNPSLKSRVTISIDTSKNQFSLKLRSVTAADTAVYYCARDYGAFDIWGQGTMVTVSS

SEQ ID NO: 30833 - DNA, 369 bp, synthetic construct
  misc_feature 1..369: note = Description of Artificial Sequence: Synthetic polynucleotide
  source 1..369: mol_type = other DNA
caggtgcagctggtggagtcggggggaggcgtggtccagcctgggaggtccctgagactctcctgtgcagcgtctggattcaccttcagtagctttatcatgcactgggtccgccaggctccaggcagggggctggagtgggtggcagttatatggtatgatggaagtaataaatactatgcagactccgtgaagggccgattcaccatctccagagacaattccaagaacacgctgtatctggaaatgaacagcctgagagtcgaggacacggctgtgtattactgtgcgagagaggagtatagcagtggctggttcgggtacggtatggacgtctggggccaagggaccacggtcaccgtctcctca

SEQ ID NO: 30834 - protein, 123 aa, synthetic construct
  REGION 1..123: note = Description of Artificial Sequence: Synthetic polypeptide
QVQLVESGGGVVQPGRSLRLSCAASGFTFSSFIMHWVRQAPGRGLEWVAVIWYDGSNKYYADSVKGRFTISRDNSKNTLYLEMNSLRVEDTAVYYCAREEYSSGWFGYGMDVWGQGTTVTVSS

SEQ ID NO: 30835 - DNA, 360 bp, synthetic construct
  misc_feature 1..360: note = Description of Artificial Sequence: Synthetic polynucleotide
  source 1..360: mol_type = other DNA
caggtgcagctggtggagtctgggggaggcgtggtccagcctgggaggtccctgagactctcctgtgcagcgtctggattcaccttcagtagctatggcatgcactgggtccgccaggctccaggcaaggggctggagtgggtggcagttatatggtatgatggaagtaatgaacactatgcagactccgtgaagggccgattcaccatctccagagacaattccaagaacacgctgtctctgcaaatgaacagcctgagagccgaggacacggctgtgtattactgtgcgagagataggggggtgggttattacggtttggacgtctggggccaagggaccacggtcaccgtctcctca

SEQ ID NO: 30836 - protein, 120 aa, synthetic construct
  REGION 1..120: note = Description of Artificial Sequence: Synthetic polypeptide
QVQLVESGGGVVQPGRSLRLSCAASGFTFSSYGMHWVRQAPGKGLEWVAVIWYDGSNEHYADSVKGRFTISRDNSKNTLSLQMNSLRAEDTAVYYCARDRGVGYYGLDVWGQGTTVTVSS

SEQ ID NO: 30837 - DNA, 360 bp, synthetic construct; identical to SEQ ID NO: 30617
  misc_feature 1..360: note = Description of Artificial Sequence: Synthetic polynucleotide
  source 1..360: mol_type = other DNA

SEQ ID NO: 30838 - protein, 120 aa, synthetic construct; identical to SEQ ID NO: 30618
  REGION 1..120: note = Description of Artificial Sequence: Synthetic polypeptide

SEQ ID NO: 30839 - DNA, 345 bp, synthetic construct
  misc_feature 1..345: note = Description of Artificial Sequence: Synthetic polynucleotide
  source 1..345: mol_type = other DNA
caggtgcagttacagcagtggggcgcaggactgttgaagccttcggagaccctgtccctcacctgcgctgtctctggtgggtccttcagatattacttctggagctggatccgccagtcccccgggaaggggctggagtggtttggggaaatcaatcatagtggacgcaccaactacaacccgtccctcaagagtcgagtcaccatatcagtagacacgtccaagaaccagttctccctgaagctgaggtctgtgaccgccgcggacacggctgtgtattactgtgcgagagactacggtgcttttgatatctggggccaaggcacattggtcaccgtctcttca

SEQ ID NO: 30840 - protein, 115 aa, synthetic construct
  REGION 1..115: note = Description of Artificial Sequence: Synthetic polypeptide
QVQLQQWGAGLLKPSETLSLTCAVSGGSFRYYFWSWIRQSPGKGLEWFGEINHSGRTNYNPSLKSRVTISVDTSKNQFSLKLRSVTAADTAVYYCARDYGAFDIWGQGTLVTVSS

SEQ ID NO: 30841 - DNA, 366 bp, synthetic construct
  misc_feature 1..366: note = Description of Artificial Sequence: Synthetic polynucleotide
  source 1..366: mol_type = other DNA
caggtgcagctggtggagtctgggggaggcgtggtccagcctgggaggtccctgagactctcctgtgcagcgtctggattcaccttcagtcactatgtcatgcactgggtccgccaggctccaggcaaggggctggagtgggtggcagttatttggtatgatggaactaataaatactatgcagactccgtgaagggccgattcaccatctccagagacaattccaagaacacgctgtatctgcaaatgaacagcctgagagccgaggacacggctgtgtattactgtgcgagagattggttcggggaggggaactactacggtatggacgtctggggccaagggaccacggtcaccgtctcctca

SEQ ID NO: 30842 - protein, 122 aa, synthetic construct
  REGION 1..122: note = Description of Artificial Sequence: Synthetic polypeptide
QVQLVESGGGVVQPGRSLRLSCAASGFTFSHYVMHWVRQAPGKGLEWVAVIWYDGTNKYYADSVKGRFTISRDNSKNTLYLQMNSLRAEDTAVYYCARDWFGEGNYYGMDVWGQGTTVTVSS

SEQ ID NO: 30843 - DNA, 363 bp, synthetic construct
  misc_feature 1..363: note = Description of Artificial Sequence: Synthetic polynucleotide
  source 1..363: mol_type = other DNA
caggtgcagctgcaggagtcgggcccaggactggtgaagccttcacagaccctgtccctcacctgcactgtctctggtgactccatcagcagcggtggttactactggagctggatccgccagcacccagggaagggcctggagtggattgggtacagctattacagtgggagcaccaactataacccgtccctcaagagtcgagttaccatatcagtagacatgtctaagaaccagttctccctgaagctgagctctgtgactgacgcggacacggccgtgtattattgtgcgagaggggggtataactggaacaacgggtttgactactggggccagggagccctggtcaccgtctcctca

SEQ ID NO: 30844 - protein, 121 aa, synthetic construct
  REGION 1..121: note = Description of Artificial Sequence: Synthetic polypeptide
QVQLQESGPGLVKPSQTLSLTCTVSGDSISSGGYYWSWIRQHPGKGLEWIGYSYYSGSTNYNPSLKSRVTISVDMSKNQFSLKLSSVTDADTAVYYCARGGYNWNNGFDYWGQGALVTVSS

SEQ ID NO: 30845 - DNA, 360 bp, synthetic construct; identical to SEQ ID NO: 30601
  misc_feature 1..360: note = Description of Artificial Sequence: Synthetic polynucleotide
  source 1..360: mol_type = other DNA

SEQ ID NO: 30846 - protein, 120 aa, synthetic construct; identical to SEQ ID NO: 30602
  REGION 1..120: note = Description of Artificial Sequence: Synthetic polypeptide

SEQ ID NO: 30847 - DNA, 381 bp, synthetic construct
  misc_feature 1..381: note = Description of Artificial Sequence: Synthetic polynucleotide
  source 1..381: mol_type = other DNA
caggtgcagctgcaggagtcgggcccaggactggtgaagccttcacagaccctgtccctcacctgcactgtctctggtggctccatcagcagtggtgattactactggaactggatccgccagctcccagggaagggcctggagtggattgggtacatcttttacagtgggagcacctactacaacccgtccctcaagagtcgacttaccatatcagtggacacgtctaagaaccagttctccctgaagctgagctctgtgactgccgcggacacggccgtgtattactgtgcgagaggggattacgatggttcggggagttatcacttctactacggtatggacgtctggggccaagggaccacggtcaccgtctcctca

SEQ ID NO: 30848 - protein, 127 aa, synthetic construct
  REGION 1..127: note = Description of Artificial Sequence: Synthetic polypeptide
QVQLQESGPGLVKPSQTLSLTCTVSGGSISSGDYYWNWIRQLPGKGLEWIGYIFYSGSTYYNPSLKSRLTISVDTSKNQFSLKLSSVTAADTAVYYCARGDYDGSGSYHFYYGMDVWGQGTTVTVSS

SEQ ID NO: 30849 - DNA, 360 bp, synthetic construct
  misc_feature 1..360: note = Description of Artificial Sequence: Synthetic polynucleotide
  source 1..360: mol_type = other DNA
caggtgcagctggtggagtctgggggaggcgtggtccagcctgggaggtccctgagactctcctgtgcagcgtctggattcaccttcagtagctatggcatgcactgggtccgccaggctccaggcaaggggctgcagtgggtggcagttatatggtatgatggaagtaatgaacactatgcagactccgtgaagggccgattcaccatctccagagacaattccaagaacacgctgtatctgcaaatgaacagcctgagagccgaggacacggctgtgtattactgtgcgagagataggggggtgggttactacggtttggacgtctggggccaagggaccacggtcaccgtctcctca

SEQ ID NO: 30850 - protein, 120 aa, synthetic construct
  REGION 1..120: note = Description of Artificial Sequence: Synthetic polypeptide
QVQLVESGGGVVQPGRSLRLSCAASGFTFSSYGMHWVRQAPGKGLQWVAVIWYDGSNEHYADSVKGRFTISRDNSKNTLYLQMNSLRAEDTAVYYCARDRGVGYYGLDVWGQGTTVTVSS

SEQ ID NO: 30851 - DNA, 366 bp, synthetic construct
  misc_feature 1..366: note = Description of Artificial Sequence: Synthetic polynucleotide
  source 1..366: mol_type = other DNA
caggtgcaactggtggagtctgggggaggcgtggtccagcctgggaggtccctgagactctcctgtgcagcgtctggattcaccttcagtagctatggcatgcactgggtccgccaggctccaggcaaggggctggagtgggtggcagttatatggtatgatggaagtaataaatactatgcagactccgtgaagggccgattcaccatctccagagacaattccaagaacacgctgtatctgcaaatgaacagcctgagagccgaggacacggctgtgtattactgtgcgagagaatggctacaattcaggtactactacggtatggacgtctggggccaagggaccacggtcaccgtctcctca

SEQ ID NO: 30852 - protein, 122 aa, synthetic construct
  REGION 1..122: note = Description of Artificial Sequence: Synthetic polypeptide
QVQLVESGGGVVQPGRSLRLSCAASGFTFSSYGMHWVRQAPGKGLEWVAVIWYDGSNKYYADSVKGRFTISRDNSKNTLYLQMNSLRAEDTAVYYCAREWLQFRYYYGMDVWGQGTTVTVSS

SEQ ID NO: 30853 - DNA, 363 bp, synthetic construct
  misc_feature 1..363: note = Description of Artificial Sequence: Synthetic polynucleotide
  source 1..363: mol_type = other DNA
caggtgcagctgcaggagtcgggcccaggactggtgaagccttcacagaccctgtccctcacctgcactgtctctggtggctccatcagcaatagtggttactactggagctggatccgccagcacccagggaagggcctggaatggattgggtacatgtattacagtgggagcacctactacaacccgtccctcaagagtcgggttaccatatctgtagacacgtctaagaaccagttttatctgaagctgagcgctgtgactgccgcggacacggccgtgtattactgtgcgaaaggggggtataactggaacaatgggtttgactgttggggccagggaaccctggtcaccgtctcctca

SEQ ID NO: 30854 - protein, 121 aa, synthetic construct
  REGION 1..121: note = Description of Artificial Sequence: Synthetic polypeptide
QVQLQESGPGLVKPSQTLSLTCTVSGGSISNSGYYWSWIRQHPGKGLEWIGYMYYSGSTYYNPSLKSRVTISVDTSKNQFYLKLSAVTAADTAVYYCAKGGYNWNNGFDCWGQGTLVTVSS

SEQ ID NO: 30855 - DNA, 363 bp, synthetic construct
  misc_feature 1..363: note = Description of Artificial Sequence: Synthetic polynucleotide
  source 1..363: mol_type = other DNA
caggtgcagctgcaggagtcgggcccaggactggtgaagccttcacagaccctgtccctcacctgcactgtctctggtggctccatcagcagtggtggttactactggagctggatccgccagcacccagggaagggcctggagtggattgggtacatctattacagtgggagcacctactacaacccgtccctcaagagtcgagttaccatatcagtagacacgtctaagaaccagttctccctgaagctgagctctgtggctgccgcggacacggccgtgtattattgtgcgagaggggggtataactggaaccacggtatggacgtctggggccaagggaccacggtcaccgtctcctca

SEQ ID NO: 30856 - protein, 121 aa, synthetic construct
  REGION 1..121: note = Description of Artificial Sequence: Synthetic polypeptide
QVQLQESGPGLVKPSQTLSLTCTVSGGSISSGGYYWSWIRQHPGKGLEWIGYIYYSGSTYYNPSLKSRVTISVDTSKNQFSLKLSSVAAADTAVYYCARGGYNWNHGMDVWGQGTTVTVSS

SEQ ID NO: 30857 - DNA, 348 bp, synthetic construct; identical to SEQ ID NO: 30683
  misc_feature 1..348: note = Description of Artificial Sequence: Synthetic polynucleotide
  source 1..348: mol_type = other DNA

SEQ ID NO: 30858 - protein, 116 aa, synthetic construct; identical to SEQ ID NO: 30684
  REGION 1..116: note = Description of Artificial Sequence: Synthetic polypeptide

SEQ ID NO: 30859 - DNA, 360 bp, synthetic construct; identical to SEQ ID NO: 30657
  misc_feature 1..360: note = Description of Artificial Sequence: Synthetic polynucleotide
  source 1..360: mol_type = other DNA

SEQ ID NO: 30860 - protein, 120 aa, synthetic construct; identical to SEQ ID NO: 30658
  REGION 1..120: note = Description of Artificial Sequence: Synthetic polypeptide

SEQ ID NO: 30861 - DNA, 348 bp, synthetic construct
  misc_feature 1..348: note = Description of Artificial Sequence: Synthetic polynucleotide
  source 1..348: mol_type = other DNA
caggtgcagctggtggagtctgggggaggcttggtcaagcctggagggtccctgagactctcctgtgcagcctctggattcaccttcagtgactactacatgagctggatccgccaggctccagggaaggggctggagtggatttcatacattagtagtagtggtattaccatgtactacgcagactctgtgaagggccgattcaccatctccagggacaacgccaagaactcactgtatctgcaaatgaacagcctgagagccgaggacacggccgtgtattactgtgcgagagaatgggtgggagccgactactggggccagggaaccctggtcaccgtctcctca

SEQ ID NO: 30862 - protein, 116 aa, synthetic construct
  REGION 1..116: note = Description of Artificial Sequence: Synthetic polypeptide
QVQLVESGGGLVKPGGSLRLSCAASGFTFSDYYMSWIRQAPGKGLEWISYISSSGITMYYADSVKGRFTISRDNAKNSLYLQMNSLRAEDTAVYYCAREWVGADYWGQGTLVTVSS

SEQ ID NO: 30863 - DNA, 348 bp, synthetic construct; identical to SEQ ID NO: 30683
  misc_feature 1..348: note = Description of Artificial Sequence: Synthetic polynucleotide
  source 1..348: mol_type = other DNA

SEQ ID NO: 30864 - protein, 116 aa, synthetic construct; identical to SEQ ID NO: 30684
  REGION 1..116: note = Description of Artificial Sequence: Synthetic polypeptide

SEQ ID NO: 30865 - DNA, 360 bp, synthetic construct
  misc_feature 1..360: note = Description of Artificial Sequence: Synthetic polynucleotide
  source 1..360: mol_type = other DNA
caggtgcagctggtggagtctgggggaggcgtggtccagcctgggaggtccctgagactctcctgtgcagcctctggattcaccttcagtagctttggcatgcactgggtccgccaggctccaggcaaggggctggagtgggtggcagttatattaaatgatggaagtaataaaaagtgtgcagactccgtgaagggccgatgcaccatttccagagacaactccaagaacacgctgtatctgcaaatgaacagcctgagagctgaggacacggctgtttattactgtgcgagaggacagcagtggctggtaaacggtgtggacgtctggggccaggggaccacggtcaccgtctcctca

SEQ ID NO: 30866 - protein, 120 aa, synthetic construct
  REGION 1..120: note = Description of Artificial Sequence: Synthetic polypeptide
QVQLVESGGGVVQPGRSLRLSCAASGFTFSSFGMHWVRQAPGKGLEWVAVILNDGSNKKCADSVKGRCTISRDNSKNTLYLQMNSLRAEDTAVYYCARGQQWLVNGVDVWGQGTTVTVSS

SEQ ID NO: 30867 - DNA, 372 bp, synthetic construct
  misc_feature 1..372: note = Description of Artificial Sequence: Synthetic polynucleotide
  source 1..372: mol_type = other DNA
gaggtgcagctgttggagtctgggggaggcttggtacagcctggggggtccctgagattctcctgtgcagcctctggattcacctttagcagctgtgccatgacctgggtccgccaggctccagggaaggggctggagtgggtctcagctattagtggtagtggtggtagcacatactacgcagactccgtgaagggccggttcaccatttccagagacaattccaagaacacgctgtatctgcaaatgaacagcctgagagccgaggacacggccgtatattactgtgcgaaagtggggggtttgactggctcctactactactacggtatggacgtctggggccaagggaccacggtcaccgtctcctca

SEQ ID NO: 30868 - protein, 124 aa, synthetic construct
  REGION 1..124: note = Description of Artificial Sequence: Synthetic polypeptide
EVQLLESGGGLVQPGGSLRFSCAASGFTFSSCAMTWVRQAPGKGLEWVSAISGSGGSTYYADSVKGRFTISRDNSKNTLYLQMNSLRAEDTAVYYCAKVGGLTGSYYYYGMDVWGQGTTVTVSS

SEQ ID NO: 30869 - DNA, 360 bp, synthetic construct; identical to SEQ ID NO: 30627
  misc_feature 1..360: note = Description of Artificial Sequence: Synthetic polynucleotide
  source 1..360: mol_type = other DNA

SEQ ID NO: 30870 - protein, 120 aa, synthetic construct; identical to SEQ ID NO: 30628
  REGION 1..120: note = Description of Artificial Sequence: Synthetic polypeptide

SEQ ID NO: 30871 - DNA, 354 bp, synthetic construct
  misc_feature 1..354: note = Description of Artificial Sequence: Synthetic polynucleotide
  source 1..354: mol_type = other DNA
caggtgcagctggtgcagtctggggctgaggtgaagaagcctggggcctcagtgaaggtctcctgcaaggcttctggatacaccttcaccaattatgatatcaactggatgcggcaggccactggtcaagggcttgagtggatgggatggatgcaccttaacagtggtaacacaggctatgcaccgaagttccagggcagagtcaccatgaccagggacacctccataagcacagccttcatggagctgagcagcctgagatctgaggacacggccgtgtattactgtgcctatagcggtggctggtacgtgttcgacccctggggccagggaaccctggtcaccgtctcctca

SEQ ID NO: 30872 - protein, 118 aa, synthetic construct
  REGION 1..118: note = Description of Artificial Sequence: Synthetic polypeptide
QVQLVQSGAEVKKPGASVKVSCKASGYTFTNYDINWMRQATGQGLEWMGWMHLNSGNTGYAPKFQGRVTMTRDTSISTAFMELSSLRSEDTAVYYCAYSGGWYVFDPWGQGTLVTVSS

SEQ ID NO: 30873 - DNA, 372 bp, synthetic construct
  misc_feature 1..372: note = Description of Artificial Sequence: Synthetic polynucleotide
  source 1..372: mol_type = other DNA
caggtgcagctggtgcagtctggggctgaggtgaagaagcctggggcctcaatgaaggtctcctgcaaggcttctggatacaccttcaccggctactatatgcactgggtgcgacaggcccctggacaagggcttgagtggatgggatggatcaaccctaacagtggtggcacaaactttgcacagaagtttcggggcagggtcaccatgaccagggacacgtccatcagcacagcctacatggagctgagcaggctgagctctgacgacacggccgtgtattactgtgcgagagggggggttcggggagttcccaactactactacgttatggacgtctggggccaagggaccacggtcaccgtctcctca

SEQ ID NO: 30874 - protein, 124 aa, synthetic construct
  REGION 1..124: note = Description of Artificial Sequence: Synthetic polypeptide
QVQLVQSGAEVKKPGASMKVSCKASGYTFTGYYMHWVRQAPGQGLEWMGWINPNSGGTNFAQKFRGRVTMTRDTSISTAYMELSRLSSDDTAVYYCARGGVRGVPNYYYVMDVWGQGTTVTVSS

SEQ ID NO: 30875 - DNA, 366 bp, synthetic construct; identical to SEQ ID NO: 30841
  misc_feature 1..366: note = Description of Artificial Sequence: Synthetic polynucleotide
  source 1..366: mol_type = other DNA

SEQ ID NO: 30876 - protein, 122 aa, synthetic construct; identical to SEQ ID NO: 30842
  REGION 1..122: note = Description of Artificial Sequence: Synthetic polypeptide

SEQ ID NO: 30877 - DNA, 366 bp, synthetic construct
  misc_feature 1..366: note = Description of Artificial Sequence: Synthetic polynucleotide
  source 1..366: mol_type = other DNA
caggtgcagctgcaggagtcgggcccaggactggtgaagccttcacagaccctgtccctcacctgcactgtctctggtggctccatgaggagtggtggtgactactggagctggatccgccagcacccagggaagggcctggagtggtttgggttcatctattacagtgggagcacctactacaatccgtccctcaagagtcgagttaccttatcagtagacacgtctaagaaccagttctccctgaagctgagctctgtgactgccgcggacacggccgtgtattactgtgcgagaatggactacagtaactactactacggtatggacgtctggggccaagggaccacggtcaccgtctcctca

SEQ ID NO: 30878 - protein, 122 aa, synthetic construct
  REGION 1..122: note = Description of Artificial Sequence: Synthetic polypeptide
QVQLQESGPGLVKPSQTLSLTCTVSGGSMRSGGDYWSWIRQHPGKGLEWFGFIYYSGSTYYNPSLKSRVTLSVDTSKNQFSLKLSSVTAADTAVYYCARMDYSNYYYGMDVWGQGTTVTVSS

SEQ ID NO: 30879 - DNA, 348 bp, synthetic construct; identical to SEQ ID NO: 30597
  misc_feature 1..348: note = Description of Artificial Sequence: Synthetic polynucleotide
  source 1..348: mol_type = other DNA

SEQ ID NO: 30880 - protein, 116 aa, synthetic construct; identical to SEQ ID NO: 30598
  REGION 1..116: note = Description of Artificial Sequence: Synthetic polypeptide

SEQ ID NO: 30881 - DNA, 366 bp, synthetic construct; identical to SEQ ID NO: 28153
  misc_feature 1..366: note = Description of Artificial Sequence: Synthetic polynucleotide
  source 1..366: mol_type = other DNA

SEQ ID NO: 30882 - protein, 122 aa, synthetic construct; identical to SEQ ID NO: 28154
  REGION 1..122: note = Description of Artificial Sequence: Synthetic polypeptide

SEQ ID NO: 30883 - DNA, 381 bp, synthetic construct; identical to SEQ ID NO: 30693
  misc_feature 1..381: note = Description of Artificial Sequence: Synthetic polynucleotide
  source 1..381: mol_type = other DNA

SEQ ID NO: 30884 - protein, 127 aa, synthetic construct; identical to SEQ ID NO: 30694
  REGION 1..127: note = Description of Artificial Sequence: Synthetic polypeptide

SEQ ID NO: 30885 - DNA, 360 bp, synthetic construct
  misc_feature 1..360: note = Description of Artificial Sequence: Synthetic polynucleotide
  source 1..360: mol_type = other DNA
caggtgcagctggtggagtctgggggaggcgtggtccagcctgggaggtccctgagactctcctgtgcagcgtctggattcaccttcagtagctatggcatgcactgggtccgccaggctccaggcaagggactggagtgggtggcagttatatggtatgatggaagtaataaaaactatgcagactccgtgaagggccgattcaccatctccagagacaattccaagaacacgctgtatctgcaaatgaacagcctgagagccgaggacacggctgtgtattactgtgcgagagatcagggcgtgggctacgacggtttggacgtctggggccaagggaccacggtcaccgtctcctca

SEQ ID NO: 30886 - protein, 120 aa, synthetic construct; identical to SEQ ID NO: 30602
  REGION 1..120: note = Description of Artificial Sequence: Synthetic polypeptide

SEQ ID NO: 30887 - DNA, 360 bp, synthetic construct
  misc_feature 1..360: note = Description of Artificial Sequence: Synthetic polynucleotide
  source 1..360: mol_type = other DNA
caggtgcaactggtggagtctgggggaggcgtggtccagcctgggaggtccctgagactctcctgtgtagcgtctgggttcaccttcagtagccatggcatgcactgggtccgccaggctccaggcaaggggctggagtgggtggcagttatatggtatgatggaagtaataaaaactatgcagactccgtgaagggccgattcaccatctccagagacaattccaagaacacgctgtatctgcaaatgaacagcctgagagccgaggacacggctgtgtattactgtgcgagagatccctctgtagggtacgacggtatggacgtctggggccaagggaccacggtcaccgtctcctca

SEQ ID NO: 30888 - protein, 120 aa, synthetic construct
  REGION 1..120: note = Description of Artificial Sequence: Synthetic polypeptide
QVQLVESGGGVVQPGRSLRLSCVASGFTFSSHGMHWVRQAPGKGLEWVAVIWYDGSNKNYADSVKGRFTISRDNSKNTLYLQMNSLRAEDTAVYYCARDPSVGYDGMDVWGQGTTVTVSS

SEQ ID NO: 30889 - DNA, 381 bp, synthetic construct
  misc_feature 1..381: note = Description of Artificial Sequence: Synthetic polynucleotide
  source 1..381: mol_type = other DNA
caggtgcagctgcaggagtcgggcccaggactggtgaagccttcacagaccctgtccctcacctgcactgtctctggtggctccatcagcagtggtgattactactggaactggatccgccagcacccagggaagggcctggagtggattgggtacatcttttacagtgggagcacctactacaacccgtccctcaagagtcgaattaccatatcagtagacacgtctaagaaccagttctccctgaagctgagctctgtgactgccgcggacacggccgtgtattactgtgcgagaggggattacgatggttcggggagttatcactactactacggtttggacgtctggggccaagggaccacggtcaccgtctcctca

SEQ ID NO: 30890 - protein, 127 aa, synthetic construct
  REGION 1..127: note = Description of Artificial Sequence: Synthetic polypeptide
QVQLQESGPGLVKPSQTLSLTCTVSGGSISSGDYYWNWIRQHPGKGLEWIGYIFYSGSTYYNPSLKSRITISVDTSKNQFSLKLSSVTAADTAVYYCARGDYDGSGSYHYYYGLDVWGQGTTVTVSS

SEQ ID NO: 30891 - DNA, 354 bp, synthetic construct; identical to SEQ ID NO: 30623
  misc_feature 1..354: note = Description of Artificial Sequence: Synthetic polynucleotide
  source 1..354: mol_type = other DNA

SEQ ID NO: 30892 - protein, 118 aa, synthetic construct; identical to SEQ ID NO: 30624
  REGION 1..118: note = Description of Artificial Sequence: Synthetic polypeptide

SEQ ID NO: 30893 - DNA, 360 bp, synthetic construct
  misc_feature 1..360: note = Description of Artificial Sequence: Synthetic polynucleotide
  source 1..360: mol_type = other DNA
caggtgcagctggtggagtctgggggaggcgtggtccagcctgggaggtccctgagactctcctgtgcagcgtctggattcaccttcagtagctatggcatgcactgggtccgccaggctccaggcaaggggctggagtgggtggcagttatatggtatgatggaagtaataaaaactacgcagactccgtgaagggccgattcaccatctccagagacaattccaagaacatgttgtatctgcaaatgaacagcctgagagccgaggacacggctatgtattactgtgcgagagatcagggcgtgggctacgacggtttggacgtctggggccaagggacctcggtcaccgtctcctca

SEQ ID NO: 30894 - protein, 120 aa, synthetic construct
  REGION 1..120: note = Description of Artificial Sequence: Synthetic polypeptide
QVQLVESGGGVVQPGRSLRLSCAASGFTFSSYGMHWVRQAPGKGLEWVAVIWYDGSNKNYADSVKGRFTISRDNSKNMLYLQMNSLRAEDTAMYYCARDQGVGYDGLDVWGQGTSVTVSS

SEQ ID NO: 30895 - DNA, 354 bp, synthetic construct; identical to SEQ ID NO: 30623
  misc_feature 1..354: note = Description of Artificial Sequence: Synthetic polynucleotide
  source 1..354: mol_type = other DNA

SEQ ID NO: 30896 - protein, 118 aa, synthetic construct; identical to SEQ ID NO: 30624
  REGION 1..118: note = Description of Artificial Sequence: Synthetic polypeptide

SEQ ID NO: 30897 - DNA, 372 bp, synthetic construct
  misc_feature 1..372: note = Description of Artificial Sequence: Synthetic polynucleotide
  source 1..372: mol_type = other DNA
gaggtgcaactattggagtctgggggaggcttggtgcagcctggggggtccctgagactctcctgtgcagcctctggattcacctttagcagctctgccatgacctgggtccgccaggctccagggaagggactggagtgggtctcagctatcattggtaatggtggtagagcatactacgcagactccgtgaagggccggttcaccatctccagagacaattccaagaacacgctgtatctgcaaatgaacagcctgagaaccgaggacacggccgtatattactgtgcgaaagatcggggatatagcaggatagcagtggctggtacctttgactactggggccagggaaccctggtcaccgtctcctca

SEQ ID NO: 30898 - protein, 124 aa, synthetic construct
  REGION 1..124: note = Description of Artificial Sequence: Synthetic polypeptide
EVQLLESGGGLVQPGGSLRLSCAASGFTFSSSAMTWVRQAPGKGLEWVSAIIGNGGRAYYADSVKGRFTISRDNSKNTLYLQMNSLRTEDTAVYYCAKDRGYSRIAVAGTFDYWGQGTLVTVSS

SEQ ID NO: 30899 - DNA, 360 bp, synthetic construct
  misc_feature 1..360: note = Description of Artificial Sequence: Synthetic polynucleotide
  source 1..360: mol_type = other DNA
caggtgcatctgcaggagtcgggcccaggactggtgaagccttcggagaccctgtccctcacctgcactgtctctggtggctccatcagtgcttactcctggagctggatccggcagcccgccgggaagggactggagtggattgggcgtctctctcctggtgggagcaccaacttcaacccctccctcaagagtcgagtcaccatgtcagtagacacgtccaagaaccagttctccctgaggctgagctctgtgaccgccgcggacacggccgtttattactgtgcgagactccggtataactggaacttcccttactttgactactggggccagggagccctggtcaccgtctcctca

SEQ ID NO: 30900 - protein, 120 aa, synthetic construct
  REGION 1..120: note = Description of Artificial Sequence: Synthetic polypeptide
QVHLQESGPGLVKPSETLSLTCTVSGGSISAYSWSWIRQPAGKGLEWIGRLSPGGSTNFNPSLKSRVTMSVDTSKNQFSLRLSSVTAADTAVYYCARLRYNWNFPYFDYWGQGALVTVSS

SEQ ID NO: 30901 - DNA, 363 bp, synthetic construct
  misc_feature 1..363: note = Description of Artificial Sequence: Synthetic polynucleotide
  source 1..363: mol_type = other DNA
gaggtgcagctgttggagtctgggggaggcttggcacagccgggggggtccctgagactctcctgtgcagcctctggattcacctttaggagctatgccatgagctgggtccgccaggctccagggaaggggctggagtgggtctcagttattagtggtagaggtggtaacacatactacgcagactccgtgaagggccggttcaccatctccagagacaattccaagaacacgctgtatctgcaaatgaacagcctgagagccgaggacacggccgtatattactgtgcgaaaggcatagcagtggctggctcgcactactttgactactggggccagggaaccctggtcaccgtctcctca

SEQ ID NO: 30902 - protein, 121 aa, synthetic construct
  REGION 1..121: note = Description of Artificial Sequence: Synthetic polypeptide
EVQLLESGGGLAQPGGSLRLSCAASGFTFRSYAMSWVRQAPGKGLEWVSVISGRGGNTYYADSVKGRFTISRDNSKNTLYLQMNSLRAEDTAVYYCAKGIAVAGSHYFDYWGQGTLVTVSS

SEQ ID NO: 30903 - DNA, 366 bp, synthetic construct
  misc_feature 1..366: note = Description of Artificial Sequence: Synthetic polynucleotide
  source 1..366: mol_type = other DNA
caggtgcagctggtggagtctgggggaggcgtggtccagcctgggaggtccctgagactctcctgtgtagcgtctggattcaccttcagtagctatggcatgcactgggtccgccaggctccaggcaaggggctggagtgggtggcagttacatggtatgatggaagtaataaatactatgcagactccgtgaagggccgattcaccatctccagagacaattccaagaacacgctgtatctgcaaatgaacagcctgagagccgaggacacggctgtgtattactgtgcgagagaatggctacaatttaggtactactacggtatagacgtctggggccaagggaccacggtcaccgtctcctca

SEQ ID NO: 30904 - protein, 122 aa, synthetic construct
  REGION 1..122: note = Description of Artificial Sequence: Synthetic polypeptide
QVQLVESGGGVVQPGRSLRLSCVASGFTFSSYGMHWVRQAPGKGLEWVAVTWYDGSNKYYADSVKGRFTISRDNSKNTLYLQMNSLRAEDTAVYYCAREWLQFRYYYGIDVWGQGTTVTVSS

SEQ ID NO: 30905 - DNA, 360 bp, synthetic construct; identical to SEQ ID NO: 30617
  misc_feature 1..360: note = Description of Artificial Sequence: Synthetic polynucleotide
  source 1..360: mol_type = other DNA

SEQ ID NO: 30906 - protein, 120 aa, synthetic construct; identical to SEQ ID NO: 30618
  REGION 1..120: note = Description of Artificial Sequence: Synthetic polypeptide

SEQ ID NO: 30907 - DNA, 360 bp, synthetic construct; identical to SEQ ID NO: 30885
  misc_feature 1..360: note = Description of Artificial Sequence: Synthetic polynucleotide
  source 1..360: mol_type = other DNA

SEQ ID NO: 30908 - protein, 120 aa, synthetic construct; identical to SEQ ID NO: 30602
  REGION 1..120: note = Description of Artificial Sequence: Synthetic polypeptide

SEQ ID NO: 30909 - DNA, 381 bp, synthetic construct
  misc_feature 1..381: note = Description of Artificial Sequence: Synthetic polynucleotide
  source 1..381: mol_type = other DNA
caggtgcaactgaaggagtcgggcccaggactggtgaagccttcacagaccctgtccctcacctgcactgtctctggtggctccatcaacagtggtgattactactggaactggttccgccagcacccagggaagggcctggagtggattgggtacatcttccacagtgggagcacctactacaacccgtccctcaagagtcgagtaaccgtatcagtagacacgtctaagaaccagttctccctgaagctgagttctgtgactgccgcggacacggccgtgtattactgtgcgagaggggattacgatggttcggggagttatcactactattacggtatggacgtctggggccgagggaccacggtcaccgtctcctca

SEQ ID NO: 30910 - protein, 127 aa, synthetic construct
  REGION 1..127: note = Description of Artificial Sequence: Synthetic polypeptide
QVQLKESGPGLVKPSQTLSLTCTVSGGSINSGDYYWNWFRQHPGKGLEWIGYIFHSGSTYYNPSLKSRVTVSVDTSKNQFSLKLSSVTAADTAVYYCARGDYDGSGSYHYYYGMDVWGRGTTVTVSS

SEQ ID NO: 30911 - DNA, 381 bp, synthetic construct
  misc_feature 1..381: note = Description of Artificial Sequence: Synthetic polynucleotide
  source 1..381: mol_type = other DNA
caggtgcagctgcaggagtcgggcccaggactggtgaagccttcacagaccctgtccctcacctgcactgtctctggtggctccatcaacagtggtggttactactggaactggatccgccagcacccagggaagggcctggagtggattgggttcatcttttacagtgggagcacctactacaacccgtccctcaagagtcgactttccatatcagtagacacgtctaagaaccagttctccctgaagctgagctctgtgactgccgcggacacggccgtgtattactgtgcgagaggggattacgatggttcggggagttatcactactattacggtatggacgtctggggccaagggaccacggtcaccgtctcctca

SEQ ID NO: 30912 - protein, 127 aa, synthetic construct
  REGION 1..127: note = Description of Artificial Sequence: Synthetic polypeptide
QVQLQESGPGLVKPSQTLSLTCTVSGGSINSGGYYWNWIRQHPGKGLEWIGFIFYSGSTYYNPSLKSRLSISVDTSKNQFSLKLSSVTAADTAVYYCARGDYDGSGSYHYYYGMDVWGQGTTVTVSS

SEQ ID NO: 30913 - DNA, 381 bp, synthetic construct
  misc_feature 1..381: note = Description of Artificial Sequence: Synthetic polynucleotide
  source 1..381: mol_type = other DNA
caggtgcagctgcaggagtcgggcccaggactggtgaagccctcacagaccctatccctcacctgcactgtctctggtggctccatcagcagtggtggttactactggagctggatccgccagcacccagggaagggcctggagtggattgggaacatctattacagtgggagcacctactacaacccgtccctcaagagtcgagttaccatatcagtagacacgtctaagaaccagttctccctgaagctgagctctgtgactgccgcggacacggccgtgtattactgtgcgagaggggattactatggttcggggagttatcacaactactacggtttggacgtctggggccaagggaccacggtcaccgtctcctca

SEQ ID NO: 30914 - protein, 127 aa, synthetic construct
  REGION 1..127: note = Description of Artificial Sequence: Synthetic polypeptide
QVQLQESGPGLVKPSQTLSLTCTVSGGSISSGGYYWSWIRQHPGKGLEWIGNIYYSGSTYYNPSLKSRVTISVDTSKNQFSLKLSSVTAADTAVYYCARGDYYGSGSYHNYYGLDVWGQGTTVTVSS

SEQ ID NO: 30915 - DNA, 360 bp, synthetic construct
  misc_feature 1..360: note = Description of Artificial Sequence: Synthetic polynucleotide
  source 1..360: mol_type = other DNA
caggtgcagctggtggagtctgggggaggcgtggtccagcctgggaggtccctgagactctcctgtgcagcgtctggattcaccttcagtagctatggcatgcactgggtccgccaggctccaggcaaggggctggagtgggtggcagttatatggtatgatggaagtaataaacactatgcagactccgtgaagggccgattcaccatctccagagacaattccaagaacacgctgtatctgcaaatgaacagcctgagagccgaggacacggctgtgtattactgtgcgagagatcagggcgtgggctactacggtatggacgtctggggccaagggaccacggtcaccgtctcctca

SEQ ID NO: 30916 - protein, 120 aa, synthetic construct
  REGION 1..120: note = Description of Artificial Sequence: Synthetic polypeptide
QVQLVESGGGVVQPGRSLRLSCAASGFTFSSYGMHWVRQAPGKGLEWVAVIWYDGSNKHYADSVKGRFTISRDNSKNTLYLQMNSLRAEDTAVYYCARDQGVGYYGMDVWGQGTTVTVSS

SEQ ID NO: 30917 - DNA, 366 bp, synthetic construct
  misc_feature 1..366: note = Description of Artificial Sequence: Synthetic polynucleotide
  source 1..366: mol_type = other DNA
caggtgcagctggtggagtctgggggaggcgtggtccagcctgggaggtccctgagactctcctgtgcagcgtctggattcaccttcagtaactatggcatgcactgggtccgccaggctccaggcaaggggctggagtgggtggcaattatatggtttgatggaagtaataaatactatgtagactccgtgaagggccgattcaccatctccagagacaattccaagaacacgctgtttctgcaaatgagcagcctgagagccgaggacacggctgtgtattattgcgcgagagaatggctacaattcaggtactactacggtatggacgtctggggccaagggaccacggtcaccgtctcctca

SEQ ID NO: 30918 - protein, 122 aa, synthetic construct
  REGION 1..122: note = Description of Artificial Sequence: Synthetic polypeptide
QVQLVESGGGVVQPGRSLRLSCAASGFTFSNYGMHWVRQAPGKGLEWVAIIWFDGSNKYYVDSVKGRFTISRDNSKNTLFLQMSSLRAEDTAVYYCAREWLQFRYYYGMDVWGQGTTVTVSS

SEQ ID NO: 30919 - DNA, 360 bp, synthetic construct; identical to SEQ ID NO: 30707
  misc_feature 1..360: note = Description of Artificial Sequence: Synthetic polynucleotide
  source 1..360: mol_type = other DNA

SEQ ID NO: 30920 - protein, 120 aa, synthetic construct; identical to SEQ ID NO: 30708
  REGION 1..120: note = Description of Artificial Sequence: Synthetic polypeptide

SEQ ID NO: 30921 - DNA, 381 bp, synthetic construct
  misc_feature 1..381: note = Description of Artificial Sequence: Synthetic polynucleotide
  source 1..381: mol_type = other DNA
caggtgcagctgcaggagtcgggcccaggactggtgaagccttcacagaccctgtccctcacctgcactgtctctggtggctccatcagcagtggtgattactactggaactggatccgccagctcccagggaagggcctggagtggattgggtacatcttttacagtgggagcacctactacaacccgtccctcaagagtcgacttaccatatcagtggacacgtctaagaaccagttctccctgaagctgagttctgtgactgccgcggacacggccgtgtattactgtgcgagaggggattacgatggttcggggagttatcacttctactacggtatggacgtctggggccaagggaccacggtcaccgtctcctca

SEQ ID NO: 30922 - protein, 127 aa, synthetic construct; identical to SEQ ID NO: 30848
  REGION 1..127: note = Description of Artificial Sequence: Synthetic polypeptide

SEQ ID NO: 30923 - DNA, 381 bp, synthetic construct
  misc_feature 1..381: note = Description of Artificial Sequence: Synthetic polynucleotide
  source 1..381: mol_type = other DNA
caggtgcagctgcaggagtcgggcccaggactggtgaagccttcacagaccctgtccctcacctgcactgtctctggtggctccatcagcagtggtgattactactggaactggctccgccagcacccagagaagggcctggagtggattgggtacatcttttacagtgggagcacctactacaacccgtccctcaagagtcgagttaccatatcagtggacacgtctatgacccagttctccctgaagctgacctctgtgactgccgcggacacggccgtgtattactgtgcgagaggggattacgatggttcggggagttatcactactactacggtatggacgtctggggccaagggaccacggtcaccgtctcctca

SEQ ID NO: 30924 - protein, 127 aa, synthetic construct
  REGION 1..127: note = Description of Artificial Sequence: Synthetic polypeptide
QVQLQESGPGLVKPSQTLSLTCTVSGGSISSGDYYWNWLRQHPEKGLEWIGYIFYSGSTYYNPSLKSRVTISVDTSMTQFSLKLTSVTAADTAVYYCARGDYDGSGSYHYYYGMDVWGQGTTVTVSS

SEQ ID NO: 30925 - DNA, 342 bp, synthetic construct; identical to SEQ ID NO: 30795
  misc_feature 1..342: note = Description of Artificial Sequence: Synthetic polynucleotide
  source 1..342: mol_type = other DNA

SEQ ID NO: 30926 - protein, 114 aa, synthetic construct; identical to SEQ ID NO: 30796
  REGION 1..114: note = Description of Artificial Sequence: Synthetic polypeptide

SEQ ID NO: 30927 - DNA, 360 bp, synthetic construct
  misc_feature 1..360: note = Description of Artificial Sequence: Synthetic polynucleotide
  source 1..360: mol_type = other DNA
caggtgcagctggtggagtctgggggaggcgtggtccagcctgggaggtccctgagactctcctgtgcagcgtctggattcaccttcagtagctatggcatgcactgggtccgccaggctccaggcaaggggctggagtgggtggcagttatatggtatgatggaagtaataaaaactatgcagactccgtgaagggccgattcaccatctccagagacaattccaagaacacgctgtatctgcaaatgaacagcctgagagccgaggacacggctgtgtattactgtgcgagagatcagggcgtgggctactacggtatggacgtctggggccaagggaccacggtcaccgtctcctca

SEQ ID NO: 30928 - protein, 120 aa, synthetic construct; identical to SEQ ID NO: 30746
  REGION 1..120: note = Description of Artificial Sequence: Synthetic polypeptide

SEQ ID NO: 30929 - DNA, 360 bp, synthetic construct; identical to SEQ ID NO: 30719
  misc_feature 1..360: note = Description of Artificial Sequence: Synthetic polynucleotide
  source 1..360: mol_type = other DNA

SEQ ID NO: 30930 - protein, 120 aa, synthetic construct; identical to SEQ ID NO: 30720
  REGION 1..120: note = Description of Artificial Sequence: Synthetic polypeptide

SEQ ID NO: 30931 - DNA, 366 bp, synthetic construct
  misc_feature 1..366: note = Description of Artificial Sequence: Synthetic polynucleotide
  source 1..366: mol_type = other DNA
caggtgcagctggtggagtctgggggaggcgtggtccagcctgggaggtccctgagactctcctgtgcagcgtctggattcaccttcagtaactatggcatgcactgggtccgccaggctccaggcaaggggctggagtgggtggcaattatatggtttgatggaagtaataaatactatgcagactccgtgaagggccgattcaccatctccagagacaattccaagaacacgctgtttctgcaaatgagcagcctgagagccgaggacacggctgtgtattactgtgcgagagaatggctacaattcaggtactactacggtatggacgtctggggccaagggaccacggtcaccgtctcctca

SEQ ID NO: 30932 - protein, 122 aa, synthetic construct
  REGION 1..122: note = Description of Artificial Sequence: Synthetic polypeptide
QVQLVESGGGVVQPGRSLRLSCAASGFTFSNYGMHWVRQAPGKGLEWVAIIWFDGSNKYYADSVKGRFTISRDNSKNTLFLQMSSLRAEDTAVYYCAREWLQFRYYYGMDVWGQGTTVTVSS

SEQ ID NO: 30933 - DNA, 381 bp, synthetic construct; identical to SEQ ID NO: 30799
  misc_feature 1..381: note = Description of Artificial Sequence: Synthetic polynucleotide
  source 1..381: mol_type = other DNA

SEQ ID NO: 30934 - protein, 127 aa, synthetic construct; identical to SEQ ID NO: 30800
  REGION 1..127: note = Description of Artificial Sequence: Synthetic polypeptide

SEQ ID NO: 30935 - DNA, 381 bp, synthetic construct; identical to SEQ ID NO: 30913
  misc_feature 1..381: note = Description of Artificial Sequence: Synthetic polynucleotide
  source 1..381: mol_type = other DNA

SEQ ID NO: 30936 - protein, 127 aa, synthetic construct; identical to SEQ ID NO: 30914
  REGION 1..127: note = Description of Artificial Sequence: Synthetic polypeptide

SEQ ID NO: 30937 - DNA, 363 bp, synthetic construct
  misc_feature 1..363: note = Description of Artificial Sequence: Synthetic polynucleotide
  source 1..363: mol_type = other DNA
gaggtgcaactgttggagtctgggggaggcttggtgcagcctggggggtccctgagactctcctgtgcagcctctggattcacctttagcagctatgccatgagctgggtccgccaggctccagggaaggggctggagtgggtctcagctattagtggtagaggcggtaatacattctacgcagactccgtgaggggccggttcaccatctccagagacaattccaagaacacgctgtatctgcaaatgaacagcctgagagccgaggacacggccgtatattactgtgcgcgacgtatagcagtggatggctatgatgcttttgatgtctggggccaagggacaatggtcaccgtctcttca

SEQ ID NO: 30938 - protein, 121 aa, synthetic construct
  REGION 1..121: note = Description of Artificial Sequence: Synthetic polypeptide
EVQLLESGGGLVQPGGSLRLSCAASGFTFSSYAMSWVRQAPGKGLEWVSAISGRGGNTFYADSVRGRFTISRDNSKNTLYLQMNSLRAEDTAVYYCARRIAVDGYDAFDVWGQGTMVTVSS

SEQ ID NO: 30939 - DNA, 366 bp, synthetic construct
  misc_feature 1..366: note = Description of Artificial Sequence: Synthetic polynucleotide
  source 1..366: mol_type = other DNA
caggtgcagctggtggagtctgggggaggcgtggtccagcctggaaggtccctgagactctcctgtgcagcgtctggattcaccttcagtagttatggcatgcactgggtccgccaggctccaggcaaggggctggagtgggtggcagttatatggtatgatggaagtaataaatactatgcagactccgtgaagggccgattcaccatctccagagacaattccaagaacacgctgtatctgcaaatgaacagcctgagagccgaggacacggctgtgtattactgtacgagagaatggctacaatttaggtattactacggtatggacgtctggggccaagggaccacggtcaccgtctcctca

SEQ ID NO: 30940 - protein, 122 aa, synthetic construct
  REGION 1..122: note = Description of Artificial Sequence: Synthetic polypeptide
QVQLVESGGGVVQPGRSLRLSCAASGFTFSSYGMHWVRQAPGKGLEWVAVIWYDGSNKYYADSVKGRFTISRDNSKNTLYLQMNSLRAEDTAVYYCTREWLQFRYYYGMDVWGQGTTVTVSS

SEQ ID NO: 30941 - DNA, 363 bp, synthetic construct
  misc_feature 1..363: note = Description of Artificial Sequence: Synthetic polynucleotide
  source 1..363: mol_type = other DNA
caggtgcagctgcaggagtcgggcccaggactggtgaagccttcacagaccctgtccctcacctgcactgtctctggtggctccatcagcagtggtggttactactggagctggatccgccagcacccagggaagggcctggagtggattgggtacatcttttacagtgggagcaccaactacaacccgtccctcaggagtcgagttaccatatcagtagacacgtctaagaaccagttctccctgaaactgagttctgtgactgccgcggacacggccgtgtattactgtgcgagagccgggtataactggaacaacggtatggacgtctggggccaagggaccacggtcaccgtctcctca

SEQ ID NO: 30942 - protein, 121 aa, synthetic construct
  REGION 1..121: note = Description of Artificial Sequence: Synthetic polypeptide
QVQLQESGPGLVKPSQTLSLTCTVSGGSISSGGYYWSWIRQHPGKGLEWIGYIFYSGSTNYNPSLRSRVTISVDTSKNQFSLKLSSVTAADTAVYYCARAGYNWNNGMDVWGQGTTVTVSS

SEQ ID NO: 30943 - DNA, 354 bp, synthetic construct; identical to SEQ ID NO: 30871
  misc_feature 1..354: note = Description of Artificial Sequence: Synthetic polynucleotide
  source 1..354: mol_type = other DNA

SEQ ID NO: 30944 - protein, 118 aa, synthetic construct; identical to SEQ ID NO: 30872
  REGION 1..118: note = Description of Artificial Sequence: Synthetic polypeptide

SEQ ID NO: 30945 - DNA, 360 bp, synthetic construct
  misc_feature 1..360: note = Description of Artificial Sequence: Synthetic polynucleotide
  source 1..360: mol_type = other DNA
caggtgcagctgcaggagtcgggcccaggactggtgaagccttcggagaccctgtccctcacctgcactgtctctggtggctccatcaataattactactggagctggatccggcagcccgccgggaagggactggagtggattgggcgtatctataccagtgggagcaccaactacaacccctccctcaagagtcgagtcaccatgtcagtagacacgtccaagaaccagttctccctgaagctgagctctgtgaccgccgcggacacggccgtgtattactgtgcgagagatcggggatactatggctactacggtatggacgtctggggccaagggaccacggtcaccgtctcctca

SEQ ID NO: 30946 - protein, 120 aa, synthetic construct
  REGION 1..120: note = Description of Artificial Sequence: Synthetic polypeptide
QVQLQESGPGLVKPSETLSLTCTVSGGSINNYYWSWIRQPAGKGLEWIGRIYTSGSTNYNPSLKSRVTMSVDTSKNQFSLKLSSVTAADTAVYYCARDRGYYGYYGMDVWGQGTTVTVSS

SEQ ID NO: 30947 - DNA, 360 bp, synthetic construct
  misc_feature 1..360: note = Description of Artificial Sequence: Synthetic polynucleotide
  source 1..360: mol_type = other DNA
caggtgcagctggtggagtctgggggaggcgtggtccagcctgggaggtccctgagactctcctgtgcagcctctggattcaccttcagtagctatggcatgcactgggtccgccaggctccaggcaaggggctggagtgggtggcagttatatcatatgatggaggttataaaaactatatagactccgtgaagggccgattcaccatctccagagacaattccaagaacacgctgtatctgcaaatgaacagcctgagagctgaggacacggctgtgttttactgtgcgagaggtacccacgggtactactacggtgtggacgtctggggccaagggaccacggtcaccgtctcctca

SEQ ID NO: 30948 - protein, 120 aa, synthetic construct
  REGION 1..120: note = Description of Artificial Sequence: Synthetic polypeptide
QVQLVESGGGVVQPGRSLRLSCAASGFTFSSYGMHWVRQAPGKGLEWVAVISYDGGYKNYIDSVKGRFTISRDNSKNTLYLQMNSLRAEDTAVFYCARGTHGYYYGVDVWGQGTTVTVSS

SEQ ID NO: 30949 - DNA, 381 bp, synthetic construct
  misc_feature 1..381: note = Description of Artificial Sequence: Synthetic polynucleotide
  source 1..381: mol_type = other DNA
caggtgcagctgcaggagtcgggcccaggactggtgaagccttcacagaccctgtccctcacctgcactgtctctggtggctccatcagcagtggtgattactactggaactggctccgccagcacccagagaagggcctggagtggattgggtacatcttttacagtgggagcacctactacaacccgtccctcaagagtcgaattaccatatcagtggacacgtctatgacccagttctccctgaagctgacctctgtgactgccgcggacacggccgtgtattactgtgcgagaggggattacgatggttcggggagttatcactactactacggtatggacgtctggggccaagggaccacggtcaccgtctcctca

SEQ ID NO: 30950 - protein, 127 aa, synthetic construct
  REGION 1..127: note = Description of Artificial Sequence: Synthetic polypeptide
QVQLQESGPGLVKPSQTLSLTCTVSGGSISSGDYYWNWLRQHPEKGLEWIGYIFYSGSTYYNPSLKSRITISVDTSMTQFSLKLTSVTAADTAVYYCARGDYDGSGSYHYYYGMDVWGQGTTVTVSS

SEQ ID NO: 30951 - DNA, 342 bp, synthetic construct
  misc_feature 1..342: note = Description of Artificial Sequence: Synthetic polynucleotide
  source 1..342: mol_type = other DNA
caggtgcagctacagcagtggggcgcaggactgttgaagccttcggagaccctgtccctcacctgcgctgtctatggtgggtccttcagtggttacttctggacctggatacgccagcccccagggaagggactggagtggattggggaaatcagtcatagtggaagcaccaactacaacccgtccctcaagagtcgagtcaccatatcagtagacacgtccaagaaccagttctccctgaaggtgagctctgtgaccgccgcggacacggctgtgtattactgtgcgagggactacggggcggactactggggccagggaaccctggtcaccgtctcctca

SEQ ID NO: 30952 - protein, 114 aa, synthetic construct
  REGION 1..114: note = Description of Artificial Sequence: Synthetic polypeptide
QVQLQQWGAGLLKPSETLSLTCAVYGGSFSGYFWTWIRQPPGKGLEWIGEISHSGSTNYNPSLKSRVTISVDTSKNQFSLKVSSVTAADTAVYYCARDYGADYWGQGTLVTVSS

SEQ ID NO: 30953 - DNA, 342 bp, synthetic construct
  misc_feature 1..342: note = Description of Artificial Sequence: Synthetic polynucleotide
  source 1..342: mol_type = other DNA
caggtgcagctacagcagtggggcgcaggactgttgaaaccttcggagaccctgtccctcacctgcgctgtcactggtgggtccttcagtggttacttctggacctggatccgccagcccccagggaaggggctggagtggattggggaaatcagtcatagtggacgcaccaactacaacccgtccctcaagagtcgagtcaccatatcaggagacacgtccaagaaccagttctccctgaagctgagctctgtgaccgccgcggacacggctgtgtattactgtgcgagggactacggggcggactactggggccagggaaccctggtcaccgtctcctca

SEQ ID NO: 30954 - protein, 114 aa, synthetic construct
  REGION 1..114: note = Description of Artificial Sequence: Synthetic polypeptide
QVQLQQWGAGLLKPSETLSLTCAVTGGSFSGYFWTWIRQPPGKGLEWIGEISHSGRTNYNPSLKSRVTISGDTSKNQFSLKLSSVTAADTAVYYCARDYGADYWGQGTLVTVSS

SEQ ID NO: 30955 - DNA, 345 bp, synthetic construct
  misc_feature 1..345: note = Description of Artificial Sequence: Synthetic polynucleotide
  source 1..345: mol_type = other DNA
caggtgcagctacagcagtggggcgcaggactgttgaagccttcggagaccctgtccctcacctgcgctgtctttgatgggtccttcagtccttactactggagctggatccgccagcccccagggaaggggctggagtggattggggaagtcaatcatagtggaagcaccaactacaacccgtccctcaagagtcgagtcaccatatcagtagacacgtccaagaaccagttctccctgaagctgagctctgtgaccgccgcggacacggctgtgtattactgtgcgagagactacgggggtttagactactggggccagggagccctggtcaccgtctcctca

SEQ ID NO: 30956 - protein, 115 aa, synthetic construct
  REGION 1..115: note = Description of Artificial Sequence: Synthetic polypeptide
QVQLQQWGAGLLKPSETLSLTCAVFDGSFSPYYWSWIRQPPGKGLEWIGEVNHSGSTNYNPSLKSRVTISVDTSKNQFSLKLSSVTAADTAVYYCARDYGGLDYWGQGALVTVSS

SEQ ID NO: 30957 - DNA, 366 bp, synthetic construct
  misc_feature 1..366: note = Description of Artificial Sequence: Synthetic polynucleotide
  source 1..366: mol_type = other DNA
caggttcagctggtgcagtctggagctgaggtgaagaagcctggggcctcagtgaaggtctcctgcaaggcttcaggttacacctttaacagctatggtatcagctgggtgcgactggcccctggacaagggcttgagtggatgggatggatcagcgcttataatggtaacacaaagaatgcacagaggttccagggcagagtcaccatgaccacagacacatccacgagcacggcctacatggagctgaggagcctgagatctgacgacacggccgtttattactgtgcgagacacgatttttggagtggttattataagggtatggacgtctggggccaagggaccacggtcaccgtctcctca

SEQ ID NO: 30958 - protein, 122 aa, synthetic construct
  REGION 1..122: note = Description of Artificial Sequence: Synthetic polypeptide
QVQLVQSGAEVKKPGASVKVSCKASGYTFNSYGISWVRLAPGQGLEWMGWISAYNGNTKNAQRFQGRVTMTTDTSTSTAYMELRSLRSDDTAVYYCARHDFWSGYYKGMDVWGQGTTVTVSS

SEQ ID NO: 30959 - DNA, 363 bp, synthetic construct
  misc_feature 1..363: note = Description of Artificial Sequence: Synthetic polynucleotide
  source 1..363: mol_type = other DNA
caggtacagctgcagcagtcaggtccaggactggtgaagccctcgcagaccctctcactcacctgtgccatctccggggacagtgtctctagcaacagtgctgcttggaactggatcaggcagtccccatcgagaggccttgagtggctgggaaggacatactacaggtccaagtggtataattattatgaagtatctgtgagaagtcgaataaccatcaacccagacacatccaagaaccagttctccctgcagctgaactctgtgactcccgaggacacggctgtatatttctgtgcgagagatcaacggtactacggtatggacgtctggggccaagggaccacggtcaccgtctcctca

SEQ ID NO: 30960 - protein, 121 aa, synthetic construct
  REGION 1..121: note = Description of Artificial Sequence: Synthetic polypeptide
QVQLQQSGPGLVKPSQTLSLTCAISGDSVSSNSAAWNWIRQSPSRGLEWLGRTYYRSKWYNYYEVSVRSRITINPDTSKNQFSLQLNSVTPEDTAVYFCARDQRYYGMDVWGQGTTVTVSS

SEQ ID NO: 30961 - DNA, 345 bp, synthetic construct
  misc_feature 1..345: note = Description of Artificial Sequence: Synthetic polynucleotide
  source 1..345: mol_type = other DNA
caggtgcagctacagcagtggggcgcaggactgttgaagccttcggagaccctgtccctcacctgcgctgtctttggtgggtccatcagtgtttactactggacctggatccgccagcccccagggaaggggctggagtggattggggaaatcaatcatagtggaagcaccaactacaacccgtccctcaagagtcgagtcaccatatcagtagacacgtccaagaaccagttctccctgaagctgagctctgtgaccgccgcggacacggctgtgtattactgtgcgagggactatggtgtctttgattactggggccagggaaccctggtcaccgtctcctca

SEQ ID NO: 30962 - protein, 115 aa, synthetic construct
  REGION 1..115: note = Description of Artificial Sequence: Synthetic polypeptide
QVQLQQWGAGLLKPSETLSLTCAVFGGSISVYYWTWIRQPPGKGLEWIGEINHSGSTNYNPSLKSRVTISVDTSKNQFSLKLSSVTAADTAVYYCARDYGVFDYWGQGTLVTVSS

SEQ ID NO: 30963 - DNA, 360 bp, synthetic construct
  misc_feature 1..360: note = Description of Artificial Sequence: Synthetic polynucleotide
  source 1..360: mol_type = other DNA
caggtgcagctggtacagtctggggctgaggtgaagaagcctggggcctcagtgaaggtctcctgcaaggcttctggatacaccttcaccggctactatatgcactgggtgcgacaggcccctggacaagggcttgagtggatgggatggatcgaccctaacagtggtggcacaaactatccacagaagtttcagggcagggtcaccatgaccagggacacgtccatcagcacagcctacatggaactgagcaggctgagatctgacgacacggccgtgttttactgtgcgaaagatcaagggtataactggaactcttttgactactggggccagggaaccctggtcaccgtctcctca

SEQ ID NO: 30964 - protein, 120 aa, synthetic construct
  REGION 1..120: note = Description of Artificial Sequence: Synthetic polypeptide
QVQLVQSGAEVKKPGASVKVSCKASGYTFTGYYMHWVRQAPGQGLEWMGWIDPNSGGTNYPQKFQGRVTMTRDTSISTAYMELSRLRSDDTAVFYCAKDQGYNWNSFDYWGQGTLVTVSS

SEQ ID NO: 30965 - DNA, 342 bp, synthetic construct
  misc_feature 1..342: note = Description of Artificial Sequence: Synthetic polynucleotide
  source 1..342: mol_type = other DNA
caggtgcagctacagcagtggggcgcaggactgttgaagccttcggagaccctgtccctcacctgcgctgtctatggtgggtccttcagtggttacttctggacctggatacgccagcccccagggaagggactggagtggattggggaaatcagtcatagtggaagcaccaactacaacccgtccctcaagagtcgagtcaccatatcagtagacacgtccaagaaccagttctccctgaaggtgaactctgtgaccgccgcggacacggctgtgtattactgtgcgagggactacggggcggactactggggccagggaaccctggtcaccgtctcctca

SEQ ID NO: 30966 - protein, 114 aa, synthetic construct
  REGION 1..114: note = Description of Artificial Sequence: Synthetic polypeptide
QVQLQQWGAGLLKPSETLSLTCAVYGGSFSGYFWTWIRQPPGKGLEWIGEISHSGSTNYNPSLKSRVTISVDTSKNQFSLKVNSVTAADTAVYYCARDYGADYWGQGTLVTVSS

SEQ ID NO: 30967 - DNA, 360 bp, synthetic construct
  misc_feature 1..360: note = Description of Artificial Sequence: Synthetic polynucleotide
  source 1..360: mol_type = other DNA
caggtgcagctggtgcagtctggggctgaggtgaagaagcctggggcctcagtgaaggtctcctgcaaggcttctggatacaccttcaccggctactatatccactgggtgcgacaggcccctggacaagggcttgagtggatggcatggatcaaccctaatagtggtggcacaaactatgcacagaagtttcagggcagggtcaccatgaccagggacacgtccatcaccacaacctacatggagctgagcaggctgagatctgacgacacggccgtgtattactgtgcgagaggatacagctatggttacaactggttcgacccctggggccagggaaccctggtcaccgtctcctca

SEQ ID NO: 30968 - protein, 120 aa, synthetic construct
  REGION 1..120: note = Description of Artificial Sequence: Synthetic polypeptide
QVQLVQSGAEVKKPGASVKVSCKASGYTFTGYYIHWVRQAPGQGLEWMAWINPNSGGTNYAQKFQGRVTMTRDTSITTTYMELSRLRSDDTAVYYCARGYSYGYNWFDPWGQGTLVTVSS

SEQ ID NO: 30969 - DNA, 366 bp, synthetic construct
  misc_feature 1..366: note = Description of Artificial Sequence: Synthetic polynucleotide
  source 1..366: mol_type = other DNA
gaggtgcagctgttggagtctgggggaggcttggtacagcctggggggtccctgagactctcctgtgtagcctctggattcacctttagcagctatgccatgagctgggtccgccaggctccagggaaggggctggagtgggtctcaactattagtggtagtggtgttagaacatactacgcagactccgtgaagggccggttcaccatctccagagacaattccaagaacacgctgtttctgcaaatgaacagcctgagagccgaggacacggccgtatattactgtgcgaaagggggagctaggagcagtggctggttccactttgactactggggccagggaaccctggtcaccgtctcctca

SEQ ID NO: 30970 - protein, 122 aa, synthetic construct
  REGION 1..122: note = Description of Artificial Sequence: Synthetic polypeptide
EVQLLESGGGLVQPGGSLRLSCVASGFTFSSYAMSWVRQAPGKGLEWVSTISGSGVRTYYADSVKGRFTISRDNSKNTLFLQMNSLRAEDTAVYYCAKGGARSSGWFHFDYWGQGTLVTVSS

SEQ ID NO: 30971 - DNA, 375 bp, synthetic construct
  misc_feature 1..375: note = Description of Artificial Sequence: Synthetic polynucleotide
  source 1..375: mol_type = other DNA
caggtgcagctggagcagtctggggctgaggtgaagaagcctggggcctcagtgaaggtctcctgcaaggcttctggatacaccttcaccagttatgatatcaactgggtgcgacaggccacaggacaagggcttgagtggctgggatggatgaaccctaagagaggtaacacaggctatgcacagaagttccagggcagagtcaccatgaccaggaatacctccataagcacagcccacatggagctgagcagcctgagatctgaggacacggccgtgtattactgtgcgagaggaaggtatagcagggaggattactactactattatgatatggacgtctggggccaagggaccacggtcaccgtctcctca

SEQ ID NO: 30972 - protein, 125 aa, synthetic construct
  REGION 1..125: note = Description of Artificial Sequence: Synthetic polypeptide
QVQLEQSGAEVKKPGASVKVSCKASGYTFTSYDINWVRQATGQGLEWLGWMNPKRGNTGYAQKFQGRVTMTRNTSISTAHMELSSLRSEDTAVYYCARGRYSREDYYYYYDMDVWGQGTTVTVSS

SEQ ID NO: 30973 - DNA, 363 bp, synthetic construct
  misc_feature 1..363: note = Description of Artificial Sequence: Synthetic polynucleotide
  source 1..363: mol_type = other DNA
caggtacagctgcagcagtcaggtccaggactggtgaagccctcgcagaccctctcactcacctgtgccatctccggggacagtgtctctagcaacagtgctgcttggaactggatcaggcagtccccatcgagaggccttgagtggctgggaaggacatactacaggtccaagtggtataattattatgaagtatctgtgaaaagtcgaataaccatcaacccagacacatccaagaaccagttctccctgcagctgaactctgtgactcccgaggacacggctgtatatttctgtgcgagagatcaacggtactacggtatggacgtctggggccaagggaccacggtcaccgtctcctca

SEQ ID NO: 30974 - protein, 121 aa, synthetic construct
  REGION 1..121: note = Description of Artificial Sequence: Synthetic polypeptide
QVQLQQSGPGLVKPSQTLSLTCAISGDSVSSNSAAWNWIRQSPSRGLEWLGRTYYRSKWYNYYEVSVKSRITINPDTSKNQFSLQLNSVTPEDTAVYFCARDQRYYGMDVWGQGTTVTVSS

SEQ ID NO: 30975 - DNA, 363 bp, synthetic construct
  misc_feature 1..363: note = Description of Artificial Sequence: Synthetic polynucleotide
  source 1..363: mol_type = other DNA
caggtacagctgcagcagtcaggtccaggactggtgaagccctcgcagaccctctcactcacctgtgccatctccggggacagtgtctctagcaacagtgctgcttggaactggatcaggcagtccccatcgagaggccttgagtggctgggaaggacatactacaggtccaagtggtataatgagtatgcagtatctgtgagaagtcgaataaccatcaacccagacacatccaagaaccagttctccctgcagctgaactctgtgactcccgaggacacggctctgtattactgtacaagagatcaacggtactacggtatggacgtctggggccaagggaccccggtcaccgtctcctca

SEQ ID NO: 30976 - protein, 121 aa, synthetic construct
  REGION 1..121: note = Description of Artificial Sequence: Synthetic polypeptide
QVQLQQSGPGLVKPSQTLSLTCAISGDSVSSNSAAWNWIRQSPSRGLEWLGRTYYRSKWYNEYAVSVRSRITINPDTSKNQFSLQLNSVTPEDTALYYCTRDQRYYGMDVWGQGTPVTVSS

SEQ ID NO: 30977 - DNA, 366 bp, synthetic construct
  misc_feature 1..366: note = Description of Artificial Sequence: Synthetic polynucleotide
  source 1..366: mol_type = other DNA
gaggtgcagctgttggagtctgggggaggcttggtacagcctggggggtccctgagactctcctgtgcagcctctggattcacctttagcagctatgccatgagctgggtccgccaggctccagggaaggggctggagtgggtctcaactattagtggtagtggtgttagaacatactacgcagactccgtgaagggccggtccaccatctccagagacaattccaagaatacgctgtttctgcaaatgaacagcctgagagccgaggacacggccgtatattactgtgcgaaagggggagctaggagcagtggctggttccactttgactactggggccagggaaccctggtcaccgtctcctca

SEQ ID NO: 30978 - protein, 122 aa, synthetic construct
  REGION 1..122: note = Description of Artificial Sequence: Synthetic polypeptide
EVQLLESGGGLVQPGGSLRLSCAASGFTFSSYAMSWVRQAPGKGLEWVSTISGSGVRTYYADSVKGRSTISRDNSKNTLFLQMNSLRAEDTAVYYCAKGGARSSGWFHFDYWGQGTLVTVSS

SEQ ID NO: 30979 - DNA, 345 bp, synthetic construct
  misc_feature 1..345: note = Description of Artificial Sequence: Synthetic polynucleotide
  source 1..345: mol_type = other DNA
caggtgcagctacagcagtggggcgcaggactgttgaagccttcggagaccctgtccctcacctgcgctgtctatgatgggtccttcagtccttactactggagctggatccgccagcccccagggaaggggctggagtggattggggaaatcaatcatagtggaagcaccaactacaatccgtccctcaagagtcgagtcaccatatcagtagacacgtccaagaaccagttctccctgaagctgagctctgtgaccgccgcggacacggctgtatattactgtgcgagagactacgggggtttagactactggggccagggaaccctggtcaccgtctcctca

SEQ ID NO: 30980 - protein, 115 aa, synthetic construct
  REGION 1..115: note = Description of Artificial Sequence: Synthetic polypeptide
QVQLQQWGAGLLKPSETLSLTCAVYDGSFSPYYWSWIRQPPGKGLEWIGEINHSGSTNYNPSLKSRVTISVDTSKNQFSLKLSSVTAADTAVYYCARDYGGLDYWGQGTLVTVSS

SEQ ID NO: 30981 - DNA, 360 bp, synthetic construct
  misc_feature 1..360: note = Description of Artificial Sequence: Synthetic polynucleotide
  source 1..360: mol_type = other DNA
caggtgcagctggtggagtctgggggaggcgtggtccagcctgggaggtccctgagactctcctgtgaagcgtctggattcaccttcagttactatggcatgcactgggtccgccaggctccaggcaagggactggagtgggtggcaattatatggtatgatggaagtaataaattctatgcagactccgtgaagggccgattcaccatctccagagacagttccaagaacacgctgtatctgcaaatgaacagcctgagagccgaggacacggctgtgtattactgtgcgagtaatatagcagcagctgccccttactttgactactggggccagggaaccctggtcaccgtctcctca

SEQ ID NO: 30982 - protein, 120 aa, synthetic construct
  REGION 1..120: note = Description of Artificial Sequence: Synthetic polypeptide
QVQLVESGGGVVQPGRSLRLSCEASGFTFSYYGMHWVRQAPGKGLEWVAIIWYDGSNKFYADSVKGRFTISRDSSKNTLYLQMNSLRAEDTAVYYCASNIAAAAPYFDYWGQGTLVTVSS

SEQ ID NO: 30983 - DNA, 360 bp, synthetic construct
  misc_feature 1..360: note = Description of Artificial Sequence: Synthetic polynucleotide
  source 1..360: mol_type = other DNA
caggtgcagctggtggagtctgggggaggcgtggtccagcctgggaggtccctgagactctcctgtgcagcgtctggattcaccttcagtagctatggcatgcactgggtccgccaggctccaggcaaggggctggagtgggtggcagttatatggtatgatggaagtaataaaaactatgcagactccgtgaagggccgattcaccatctccagagacaattccaagaacacgctgtatctgcaaatgaacagcctgagagccgaggacacggctgtgtattactgtgcgagagatagaacagttggctacaacggtatggacgtctggggccaagggaccacggtcaccgtctcctca

SEQ ID NO: 30984 - protein, 120 aa, synthetic construct
  REGION 1..120: note = Description of Artificial Sequence: Synthetic polypeptide
QVQLVESGGGVVQPGRSLRLSCAASGFTFSSYGMHWVRQAPGKGLEWVAVIWYDGSNKNYADSVKGRFTISRDNSKNTLYLQMNSLRAEDTAVYYCARDRTVGYNGMDVWGQGTTVTVSS

SEQ ID NO: 30985 - DNA, 360 bp, synthetic construct
  misc_feature 1..360: note = Description of Artificial Sequence: Synthetic polynucleotide
  source 1..360: mol_type = other DNA
caggtgcagctggtgcagtctggggctgaggtgaagaagcctggggcctcagtgaaggtctcctgcaaggcttctggatacaccttcaccggctactatatccactgggtgcgacaggcccctggacaagggcttgagtggatggcatggatcaaccctaatagtggtggcacaaactatgcacagaagtttcagggcagggtcaccatgaccagggacacgtccatcaccacagcctacatggagctgagcaggctgagatctgacgacacggccgtgtattactgtgcgagaggatacagctatggttacaactggttcgacccctggggccagggaaccctggtcaccgtctcctca

SEQ ID NO: 30986 - protein, 120 aa, synthetic construct
  REGION 1..120: note = Description of Artificial Sequence: Synthetic polypeptide
QVQLVQSGAEVKKPGASVKVSCKASGYTFTGYYIHWVRQAPGQGLEWMAWINPNSGGTNYAQKFQGRVTMTRDTSITTAYMELSRLRSDDTAVYYCARGYSYGYNWFDPWGQGTLVTVSS

SEQ ID NO: 30987 - DNA, 369 bp, synthetic construct; identical to SEQ ID NO: 28155
  misc_feature 1..369: note = Description of Artificial Sequence: Synthetic polynucleotide
  source 1..369: mol_type = other DNA

SEQ ID NO: 30988 - protein, 123 aa, synthetic construct; identical to SEQ ID NO: 28156
  REGION 1..123: note = Description of Artificial Sequence: Synthetic polypeptide

SEQ ID NO: 30989 - DNA, 351 bp, synthetic construct
  misc_feature 1..351: note = Description of Artificial Sequence: Synthetic polynucleotide
  source 1..351: mol_type = other DNA
caggtgcagctggtggagtctgggggaggcgtggtccagcctgggaggtccctgagactctcctgtgcagcgtcaggattcaccctcagtagttttggcatgcactgggtccgccaggctccaggcaaggggctggagtgggtggcagttatatggtatgatgtaaataataaatactatgcagactccgtgaagggccgattcacaatctccagagacaattccaagaacacgctgtatctccaaatgaacagcctgagacccgaggacacggctgtgtattactgtgcgagagaactggggttcctctctgactactggggccagggaatcctggtcaccgtctcctca

SEQ ID NO: 30990 - protein, 117 aa, synthetic construct
  REGION 1..117: note = Description of Artificial Sequence: Synthetic polypeptide
QVQLVESGGGVVQPGRSLRLSCAASGFTLSSFGMHWVRQAPGKGLEWVAVIWYDVNNKYYADSVKGRFTISRDNSKNTLYLQMNSLRPEDTAVYYCARELGFLSDYWGQGILVTVSS

SEQ ID NO: 30991 - DNA, 348 bp, synthetic construct
  misc_feature 1..348: note = Description of Artificial Sequence: Synthetic polynucleotide
  source 1..348: mol_type = other DNA
caggtgcaactggtggagtctgggggaggcttggtcaagcctggagggtccctgagactctcctgtgcagcctctggattcaccttcagtgactactacatgagctggatccgccaggctccagggaaggggctggagtgggttttatacattagtggtagtggtactaccacatactacgcagactctgtgaagggccgattcaccatctccagggacaacgccaagaactcactgtatctgcaaatgaacagcctgagagccgaggacacggccgtgtattactgtgcgagagatagggggggtttggacgtctggggccaagggaccacggtcaccgtctcctca

SEQ ID NO: 30992 - protein, 116 aa, synthetic construct
  REGION 1..116: note = Description of Artificial Sequence: Synthetic polypeptide
QVQLVESGGGLVKPGGSLRLSCAASGFTFSDYYMSWIRQAPGKGLEWVLYISGSGTTTYYADSVKGRFTISRDNAKNSLYLQMNSLRAEDTAVYYCARDRGGLDVWGQGTTVTVSS

SEQ ID NO: 30993 - DNA, 354 bp, synthetic construct
  misc_feature 1..354: note = Description of Artificial Sequence: Synthetic polynucleotide
  source 1..354: mol_type = other DNA
caggtgcagctggtgcagtctggggctgcggtgaagaagcctggggcctcagtgaaggtctcctgcaaggcttctggatacaccttcaccaattatgatatcaactgggtgcgacaggccactggacaagggcttgagtggatgggatggatgcaccctaacagtggtaacacaggctatgcacagaagttccagggcagagtcaccatgaccaggaacacctccataagcacagcctacatggagctgagcagcctgagatctgaggacacggccgtgtattactgtgcctatagcagtggctggtactactttgactactggggccagggaaccctggtcaccgtctcctca

SEQ ID NO: 30994 - protein, 118 aa, synthetic construct
  REGION 1..118: note = Description of Artificial Sequence: Synthetic polypeptide
QVQLVQSGAAVKKPGASVKVSCKASGYTFTNYDINWVRQATGQGLEWMGWMHPNSGNTGYAQKFQGRVTMTRNTSISTAYMELSSLRSEDTAVYYCAYSSGWYYFDYWGQGTLVTVSS

SEQ ID NO: 30995 - DNA, 369 bp, synthetic construct
  misc_feature 1..369: note = Description of Artificial Sequence: Synthetic polynucleotide
  source 1..369: mol_type = other DNA
caggtgcagctggtggagtctgggggaggcgtgggccagcctgggaggtccctgagactctcctgtacagcgtctggattcaccttcagtagctatgtcatgcactgggtccgccaggctccaggcaaggggctggagtgggtggcagttatatggtatgatggaagtaataaatataatgcagactccgtgaagggccgattcaccatctccagagacaattccaagaacacgctgtatctgcaaatgaacagcctgagagccgaggacacggctgtgtattactgtgcgagagaaccgtatagcagcagctggtacgactacggtatggacgtctcgggccaagggaccacggtcaccgtctcctca

SEQ ID NO: 30996 - protein, 123 aa, synthetic construct
  REGION 1..123: note = Description of Artificial Sequence: Synthetic polypeptide
QVQLVESGGGVGQPGRSLRLSCTASGFTFSSYVMHWVRQAPGKGLEWVAVIWYDGSNKYNADSVKGRFTISRDNSKNTLYLQMNSLRAEDTAVYYCAREPYSSSWYDYGMDVSGQGTTVTVSS

SEQ ID NO: 30997 - DNA, 360 bp, synthetic construct; identical to SEQ ID NO: 30985
  misc_feature 1..360: note = Description of Artificial Sequence: Synthetic polynucleotide
  source 1..360: mol_type = other DNA

SEQ ID NO: 30998 - protein, 120 aa, synthetic construct; identical to SEQ ID NO: 30986
  REGION 1..120: note = Description of Artificial Sequence: Synthetic polypeptide

SEQ ID NO: 30999 - DNA, 363 bp, synthetic construct
  misc_feature 1..363: note = Description of Artificial Sequence: Synthetic polynucleotide
  source 1..363: mol_type = other DNA
caggtacagctgcagcagtcaggtccaggactggtgaagccctcgcagaccctctcactcacctgtgccatctccggggacagtgtctctagcaacagtgctgcttggaactggatcaggcagtccccatcgagaggccttgagtggctgggaaggacatactacaggtccaagtggtataattattatgaagtatctgtgagaagtcgagtaaccatcaacccagacacatccaagaaccagttctccctgcaactgaactctgtgactcccgaggacacggctgtgtatttctgtgcgagagatcaacggtactacggtatggacgtctggggccaagggaccacggtcaccgtctcctca

SEQ ID NO: 31000 - protein, 121 aa, synthetic construct
  REGION 1..121: note = Description of Artificial Sequence: Synthetic polypeptide
QVQLQQSGPGLVKPSQTLSLTCAISGDSVSSNSAAWNWIRQSPSRGLEWLGRTYYRSKWYNYYEVSVRSRVTINPDTSKNQFSLQLNSVTPEDTAVYFCARDQRYYGMDVWGQGTTVTVSS

SEQ ID NO: 31001 - DNA, 372 bp, synthetic construct
  misc_feature 1..372: note = Description of Artificial Sequence: Synthetic polynucleotide
  source 1..372: mol_type = other DNA
gaggtgcaggtgttggagtctgggggaggcttggtgcagcctggggggtccctgcgactctcctgtgcagcctctggattcacctttagcacctatgccatgagctgggtccgccaggctccagggaaggggctggagtgggtctcagctattagtggtagtggtggtagcacatattacgcagactccgtgaagggccggttcaccatctccagagacaattccaagaacacgctgtatctgcaaatggacagcctgagagccgaggacacggccgtatattactgtgcgaaagggataagtggaaccggctcctactactactacggtgtggacgtctggggccaagggaccacggtcaccgtctcctca

SEQ ID NO: 31002 - protein, 124 aa, synthetic construct
  REGION 1..124: note = Description of Artificial Sequence: Synthetic polypeptide
EVQVLESGGGLVQPGGSLRLSCAASGFTFSTYAMSWVRQAPGKGLEWVSAISGSGGSTYYADSVKGRFTISRDNSKNTLYLQMDSLRAEDTAVYYCAKGISGTGSYYYYGVDVWGQGTTVTVSS

SEQ ID NO: 31003 - DNA, 360 bp, synthetic construct
  misc_feature 1..360: note = Description of Artificial Sequence: Synthetic polynucleotide
  source 1..360: mol_type = other DNA
caggtgcagctggtggagtctgggggaggcgtggtccagcctgggaggtccctgagactctcctgtacagcgtctggattcaccttcagtagctatggcatgcactgggtccgccaggctccaggcaaggggctggagtgggtggcagttatatggtatgatggaagtaataaaaactatgcagactccgtgaagggccgattcaccatctccagagacaattccaagaacacgctgtatctgcaaatgaacagcctgagagccgaggacacggctgtgtattactgtgcgagagatcgaggtgtcggctacgacggtatggacgtctggggccaagggaccacggtcaccgtctcctca

SEQ ID NO: 31004 - protein, 120 aa, synthetic construct
  REGION 1..120: note = Description of Artificial Sequence: Synthetic polypeptide
QVQLVESGGGVVQPGRSLRLSCTASGFTFSSYGMHWVRQAPGKGLEWVAVIWYDGSNKNYADSVKGRFTISRDNSKNTLYLQMNSLRAEDTAVYYCARDRGVGYDGMDVWGQGTTVTVSS

SEQ ID NO: 31005 - DNA, 360 bp, synthetic construct
  misc_feature 1..360: note = Description of Artificial Sequence: Synthetic polynucleotide
  source 1..360: mol_type = other DNA
caggtgcagctggtggagtctgggggagacgtggtccagcctgggaggtccctgagactctcatgtgcagcgtctggattcaccttcagtagctatggcatgcactggggccgccaggctccaggcaaggggctggagtgggtggcagttatatggtatgatggtagcaatgaaaattatgtagcctccgtgaagggccgattcaccatcttcagagacaattccaagaacacgctgtatctgcaaatgaacagcctgagagccgaggacacggctgtgtattactgtgcgagagatctggggatagggtattacggtatggacgtctggggccaagggaccacggtcaccgtctcctca

SEQ ID NO: 31006 - protein, 120 aa, synthetic construct
  REGION 1..120: note = Description of Artificial Sequence: Synthetic polypeptide
QVQLVESGGDVVQPGRSLRLSCAASGFTFSSYGMHWGRQAPGKGLEWVAVIWYDGSNENYVASVKGRFTIFRDNSKNTLYLQMNSLRAEDTAVYYCARDLGIGYYGMDVWGQGTTVTVSS

SEQ ID NO: 31007 - DNA, 342 bp, synthetic construct
  misc_feature 1..342: note = Description of Artificial Sequence: Synthetic polynucleotide
  source 1..342: mol_type = other DNA
caggtgcagctacagcagtggggcgcaggactgttgaagccttcggagaccctgttcctcacctgcgctgtctatggtgggtccttcagtggttacttctggacctgggtccgccagcccccagggaagggactggagtggattggggaaatcagtcatagtggaagcaccagttacaacccgtccctcaagagtcgagtcaccatatcagtagacaagtccaagaaccagttctccctgaagctgagctctgtgaccgccgcggacacggctgtgtattactgtgcgagggactacggggccgactactggggccagggaaccctggtcaccgtctcctca

SEQ ID NO: 31008 - protein, 114 aa, synthetic construct
  REGION 1..114: note = Description of Artificial Sequence: Synthetic polypeptide
QVQLQQWGAGLLKPSETLFLTCAVYGGSFSGYFWTWVRQPPGKGLEWIGEISHSGSTSYNPSLKSRVTISVDKSKNQFSLKLSSVTAADTAVYYCARDYGADYWGQGTLVTVSS

SEQ ID NO: 31009 - DNA, 351 bp, synthetic construct
  misc_feature 1..351: note = Description of Artificial Sequence: Synthetic polynucleotide
  source 1..351: mol_type = other DNA
caggtgcagctacagcagtggggcgcaggactgttgaagccttcggagaccctgtccctcacctgcgctgtctttggtgggtccttcagtggtcactactggagctggatccgccagcccccagggaaggggctggagtggattggggaaatgtatcattttggaaacaccaactacaacccgtccctcaagagtcgagtcaccatgtcagtagacacgtccaagaaacagttctccctgaagctgagctctgtgaccgccgcggacacggctgtgtattactgtgcgagagtggggcagtggctggcttttgatatctggggccaagggacaatggtcaccgtctcttca

SEQ ID NO: 31010 - protein, 117 aa, synthetic construct
  REGION 1..117: note = Description of Artificial Sequence: Synthetic polypeptide
QVQLQQWGAGLLKPSETLSLTCAVFGGSFSGHYWSWIRQPPGKGLEWIGEMYHFGNTNYNPSLKSRVTMSVDTSKKQFSLKLSSVTAADTAVYYCARVGQWLAFDIWGQGTMVTVSS

SEQ ID NO: 31011 - DNA, 360 bp, synthetic construct
  misc_feature 1..360: note = Description of Artificial Sequence: Synthetic polynucleotide
  source 1..360: mol_type = other DNA
caggtgcagctggtggagtctgggggaggcgtggtccagcctgggaggtccctgagactctcctgtgcagcgtctggattcaccttcagtagctatggcatgcactgggtccgccaggctccaggcaaggggctggagtgggtggcagttatatggtatgatggaagtaataaatactatgcagactccgtgaagggccgattcaccatctccagagacaattccaagaacacgctgtatctgcaaatgaacagcctgagagccgaggacacggctgtatattactgtgcgagagatagatcagttggctacgacggtacggacgtctggggccaagggaccacggtcaccgtctcctca

SEQ ID NO: 31012 - protein, 120 aa, synthetic construct
  REGION 1..120: note = Description of Artificial Sequence: Synthetic polypeptide
QVQLVESGGGVVQPGRSLRLSCAASGFTFSSYGMHWVRQAPGKGLEWVAVIWYDGSNKYYADSVKGRFTISRDNSKNTLYLQMNSLRAEDTAVYYCARDRSVGYDGTDVWGQGTTVTVSS

SEQ ID NO: 31013 - DNA, 363 bp, synthetic construct
  misc_feature 1..363: note = Description of Artificial Sequence: Synthetic polynucleotide
  source 1..363: mol_type = other DNA
caggtacagctgcagcagtcaggtccaggactggtgaagccctcgcagaccctctcactcacctgtgccatctccggggacagtgtctctagcaacagtgctgcttggaactggatcaggcagtccccatcgagaggccttgagtggctgggaaggacatattacaggtccaagtggtataattattatgaagtatctgtgagaagtcgaataaccatcaacccagacacatccaagaaccagttctccctgcagctgaattctgtgactcccgaggacacggctgtgtatttctgtgcgagagatcaacggtactacggtatggacgtctggggccaagggaccacggtcaccgtctcctca

SEQ ID NO: 31014 - protein, 121 aa, synthetic construct; identical to SEQ ID NO: 30960
  REGION 1..121: note = Description of Artificial Sequence: Synthetic polypeptide

SEQ ID NO: 31015 - DNA, 360 bp, synthetic construct
  misc_feature 1..360: note = Description of Artificial Sequence: Synthetic polynucleotide
  source 1..360: mol_type = other DNA
caggtgcagctggtggagtctgggggaggcgtggtccagcctgggaggtccctgagactctcctgtgcagcgtctggattcaccttcagtagatatggcatgcactgggtccgccaggctccaggcaagggactggagtgggtggcagttatatggtatgatggaagtaatgagaattatgtagactccgtgaagggccgattcaccatctccagagacacttccaagaaaatgctgtttctgcaaatgaacagcctgagaaccgatgacacggctgtgtattactgtgcgagagatatggggatagggtattatggtatggacgtctggggccaagggaccacggtcaccgtctcctca

SEQ ID NO: 31016 - protein, 120 aa, synthetic construct
  REGION 1..120: note = Description of Artificial Sequence: Synthetic polypeptide
QVQLVESGGGVVQPGRSLRLSCAASGFTFSRYGMHWVRQAPGKGLEWVAVIWYDGSNENYVDSVKGRFTISRDTSKKMLFLQMNSLRTDDTAVYYCARDMGIGYYGMDVWGQGTTVTVSS

SEQ ID NO: 31017 - DNA, 345 bp, synthetic construct
  misc_feature 1..345: note = Description of Artificial Sequence: Synthetic polynucleotide
  source 1..345: mol_type = other DNA
caggtgcagctacagcagtggggcgcaggactgttgaagccttcggagaccctgtccctcacctgcgctgtctatggtgggtccttcagtgtttattactggagctggatccgccagcccccagggaaggggctggagtggattggggaaagcaatcagagtggacgcaccacctacaacccgtccctcaagagtcgagtcaccatatcagtagacacgtccaagaaccagttctccctgaatctgatctctgtgaccgccgcggacacggctgtgtattactgtgcgagggactacggtgtctttgactactggggccagggaaccctggtcaccgtctcctca

SEQ ID NO: 31018 - protein, 115 aa, synthetic construct
  REGION 1..115: note = Description of Artificial Sequence: Synthetic polypeptide
QVQLQQWGAGLLKPSETLSLTCAVYGGSFSVYYWSWIRQPPGKGLEWIGESNQSGRTTYNPSLKSRVTISVDTSKNQFSLNLISVTAADTAVYYCARDYGVFDYWGQGTLVTVSS

SEQ ID NO: 31019 - DNA, 366 bp, synthetic construct
  misc_feature 1..366: note = Description of Artificial Sequence: Synthetic polynucleotide
  source 1..366: mol_type = other DNA
gaggtgcaactgttggagtctgggggaggcttggtacagcctggggggtcccagagactctcctgtgcagcctctggattcacctttagcagctatgccatgagctgggtccgccaggctccagggaaggggctggagtgggtctcaactattagtggtagtggtgttagaacatactacgcagactccgtgaagggccggttcaccatctccagagacaattccaataacacgctgtttctgcaaatgaacagcctgagagccgaggacacggccgtatattactgtgcgaaagggggagctaggagcagtggctggttccactttgactactggggccagggaaccctggtcaccgtctcctca

SEQ ID NO: 31020 - protein, 122 aa, synthetic construct
  REGION 1..122: note = Description of Artificial Sequence: Synthetic polypeptide
EVQLLESGGGLVQPGGSQRLSCAASGFTFSSYAMSWVRQAPGKGLEWVSTISGSGVRTYYADSVKGRFTISRDNSNNTLFLQMNSLRAEDTAVYYCAKGGARSSGWFHFDYWGQGTLVTVSS

SEQ ID NO: 31021 - DNA, 363 bp, synthetic construct
  misc_feature 1..363: note = Description of Artificial Sequence: Synthetic polynucleotide
  source 1..363: mol_type = other DNA
caggtgcagctggtggagtctgggggaggcgtggtccagcctgggaggtccctgagactctcctgtgcagcgtctggattcaccttcagtagctatgccatgcactgggtccgccaggctccaggcaaggggctggagtgggtggcagctatatggtatgatggaagtaataaatacaatgcagactccgtgaagggccgattcaccatctccagagacaattccaagaacacgctgtatatgcaaatgaacagcctgagagccgaggacacggctgtatactactgtgcgagagatgtgggtacagtgggagctacctactttgactgctggggcccgggaaccctggtcaccgtctcctca

SEQ ID NO: 31022 - protein, 121 aa, synthetic construct
  REGION 1..121: note = Description of Artificial Sequence: Synthetic polypeptide
QVQLVESGGGVVQPGRSLRLSCAASGFTFSSYAMHWVRQAPGKGLEWVAAIWYDGSNKYNADSVKGRFTISRDNSKNTLYMQMNSLRAEDTAVYYCARDVGTVGATYFDCWGPGTLVTVSS

SEQ ID NO: 31023 - DNA, 342 bp, synthetic construct
  misc_feature 1..342: note = Description of Artificial Sequence: Synthetic polynucleotide
  source 1..342: mol_type = other DNA
caggtgcagctacagcagtggggcgcaggactgttgaagccttcggagaccctgtccctcacctgcgctgtctatggtgggtccttcagtggttacttctggagctggatccgccagcccccagggaaggggctggagtggattggggaaatcagtcatagtggacgcaccaactacaacccgtccctcaagagccgagtcaccatatcagtagacacgtccaagaaccagttctccctgaaggtgagctctgtgaccgccgcggacacggctgtgtattactgtgcgagggactacggggcggactactggggccagggaaccctggtcaccgtctcctca

SEQ ID NO: 31024 - protein, 114 aa, synthetic construct
  REGION 1..114: note = Description of Artificial Sequence: Synthetic polypeptide
QVQLQQWGAGLLKPSETLSLTCAVYGGSFSGYFWSWIRQPPGKGLEWIGEISHSGRTNYNPSLKSRVTISVDTSKNQFSLKVSSVTAADTAVYYCARDYGADYWGQGTLVTVSS

SEQ ID NO: 31025 - DNA, 345 bp, synthetic construct
  misc_feature 1..345: note = Description of Artificial Sequence: Synthetic polynucleotide
  source 1..345: mol_type = other DNA
caggtgcagctacagcagcggggcgcaggactgttgaagccttcggagaccctgtccctcacctgcgctgcctatggtgggtccttcagtggtccctactggagctggatccgccagcccccagggaagggcctggagtggattggggaaatcaatcatagtggaagcaccaactacaacccgtccctcaagagtcgagtcaccatatcagtagacacgtccaagaaccagttctccctgaagctgagctctgtgaccgccgcggacacggctgtttactactgtgcgagggactacggtgtccttgactactggggccagggaaccctggtcaccgtctcctca

SEQ ID NO: 31026 - protein, 115 aa, synthetic construct
  REGION 1..115: note = Description of Artificial Sequence: Synthetic polypeptide
QVQLQQRGAGLLKPSETLSLTCAAYGGSFSGPYWSWIRQPPGKGLEWIGEINHSGSTNYNPSLKSRVTISVDTSKNQFSLKLSSVTAADTAVYYCARDYGVLDYWGQGTLVTVSS

SEQ ID NO: 31027 - DNA, 360 bp, synthetic construct; identical to SEQ ID NO: 30985
  misc_feature 1..360: note = Description of Artificial Sequence: Synthetic polynucleotide
  source 1..360: mol_type = other DNA

SEQ ID NO: 31028 - protein, 120 aa, synthetic construct; identical to SEQ ID NO: 30986
  REGION 1..120: note = Description of Artificial Sequence: Synthetic polypeptide

SEQ ID NO: 31029 - DNA, 360 bp, synthetic construct
  misc_feature 1..360: note = Description of Artificial Sequence: Synthetic polynucleotide
  source 1..360: mol_type = other DNA
caggtgcagctggtgcagtctggggctgaggtgaagaagcctggggcctcagtgaaggtctcctgcaaggcttctggatacaccttcaccggctactatatacactgggtgcgacaggcccctggacaagggcttgagtggatgggatggatcgaccctaatagtggtggcacaaactatgcacagaagtttcagggcagaatcaccatgaccagggacacgtccatcagtacagcctacatggaactgagcaggctgagatctgacgacacggccgtgttttactgtgcgaaagatcaagggtataactggaactcttttgactactggggccagggaaccctggtcaccgtctcctca

SEQ ID NO: 31030 - protein, 120 aa, synthetic construct
  REGION 1..120: note = Description of Artificial Sequence: Synthetic polypeptide
QVQLVQSGAEVKKPGASVKVSCKASGYTFTGYYIHWVRQAPGQGLEWMGWIDPNSGGTNYAQKFQGRITMTRDTSISTAYMELSRLRSDDTAVFYCAKDQGYNWNSFDYWGQGTLVTVSS

SEQ ID NO: 31031 - DNA, 360 bp, synthetic construct; identical to SEQ ID NO: 30985
  misc_feature 1..360: note = Description of Artificial Sequence: Synthetic polynucleotide
  source 1..360: mol_type = other DNA

SEQ ID NO: 31032 - protein, 120 aa, synthetic construct; identical to SEQ ID NO: 30986
  REGION 1..120: note = Description of Artificial Sequence: Synthetic polypeptide

SEQ ID NO: 31033 - DNA, 360 bp, synthetic construct
  misc_feature 1..360: note = Description of Artificial Sequence: Synthetic polynucleotide
  source 1..360: mol_type = other DNA
caggtgcagctggtggagtctgggggaggcgtggtccagcctgggaggtccctgagactctcctgtgcagcgtctggattcaccttcagtagctatggcatgcactgggtccgccaggctccaggcaaggggctggagtgggtggcagttatatggtatgatggaagtaataaaaactatgcagagtccgtgaagggccgattcaccatctccagagacaattccaagaacacgctgtatctgcaaatgaacagcctgagagccgaggacacggctgtgtattattgtgcgagagatgcgggtattggatactacggtatagacgtctggggccaagggaccacggtcaccgtctcctca

SEQ ID NO: 31034 - protein, 120 aa, synthetic construct
  REGION 1..120: note = Description of Artificial Sequence: Synthetic polypeptide
QVQLVESGGGVVQPGRSLRLSCAASGFTFSSYGMHWVRQAPGKGLEWVAVIWYDGSNKNYAESVKGRFTISRDNSKNTLYLQMNSLRAEDTAVYYCARDAGIGYYGIDVWGQGTTVTVSS

SEQ ID NO: 31035 - DNA, 351 bp, synthetic construct
  misc_feature 1..351: note = Description of Artificial Sequence: Synthetic polynucleotide
  source 1..351: mol_type = other DNA
caggtgcagctggtggagtctgggggaggcgtggtccagcctgggaggtccctgagactctcctgtgcagcgtctggattcaccttcagtaactatggcatgcactgggtccgccaggctccaggcaaggggctggagtgggtggcagttatatggtatgatagaaataataaatactatggtgactccgtgaagggccgattcaccatctccagagacaattccaagaacacgctgtatctgcaaatgaacagcctgagagccgaggacacggctgtgtattactgtgcgagagaactggggttcctctttgactactggggccagggaaccctggtcaccgtctcctca

SEQ ID NO: 31036 - protein, 117 aa, synthetic construct
  REGION 1..117: note = Description of Artificial Sequence: Synthetic polypeptide
QVQLVESGGGVVQPGRSLRLSCAASGFTFSNYGMHWVRQAPGKGLEWVAVIWYDRNNKYYGDSVKGRFTISRDNSKNTLYLQMNSLRAEDTAVYYCARELGFLFDYWGQGTLVTVSS

SEQ ID NO: 31037 - DNA, 369 bp, synthetic construct
  misc_feature 1..369: note = Description of Artificial Sequence: Synthetic polynucleotide
  source 1..369: mol_type = other DNA
caggtgcagctggtggagtctgggggaggcgtggtccagcctgggaggtccctgagactctcctgtgcagcgtctggattcaccttcagtgactgtgtcatgcactgggtccgccaggctccaggcaaggggctggagtgggtggcagttatatggtatgatggaagtaataaatactatgtagactccgtgaagggccgattcaccatctccagagacaattccaggaacacgctgtatctgcaaatgaacagcctgagagccgaggacacggctgtgtattactgtgcgagagaacggtatagcagtggcttgtacgactacggtttggacgtctggggccaagggaccacggtcaccgtctcctca

SEQ ID NO: 31038 - protein, 123 aa, synthetic construct
  REGION 1..123: note = Description of Artificial Sequence: Synthetic polypeptide
QVQLVESGGGVVQPGRSLRLSCAASGFTFSDCVMHWVRQAPGKGLEWVAVIWYDGSNKYYVDSVKGRFTISRDNSRNTLYLQMNSLRAEDTAVYYCARERYSSGLYDYGLDVWGQGTTVTVSS

SEQ ID NO: 31039 - DNA, 366 bp, synthetic construct
  misc_feature 1..366: note = Description of Artificial Sequence: Synthetic polynucleotide
  source 1..366: mol_type = other DNA
gaggtgcagctgttggagtctgggggaggcttggtacagcctggggggtccctgagactctcctgtgcagcctctggattcacctttagcagctatgccatgagctgggtccgccaggctccagggaaggggctggagtgggtctcaactattagtggtagtggtgttagaacatactacgcagactccgtgaagggccggtccaccatctccagagacaattccaagaatacgctgtttctgcaaatgaacagcctgagagccgaggacaaggccgtatattactgtgcgaaagggggagctaggagcagtggctggttccactttgactactggggccagggaaccctggtcaccgtctcctca

SEQ ID NO: 31040 - protein, 122 aa, synthetic construct
  REGION 1..122: note = Description of Artificial Sequence: Synthetic polypeptide
EVQLLESGGGLVQPGGSLRLSCAASGFTFSSYAMSWVRQAPGKGLEWVSTISGSGVRTYYADSVKGRSTISRDNSKNTLFLQMNSLRAEDKAVYYCAKGGARSSGWFHFDYWGQGTLVTVSS

SEQ ID NO: 31041 - DNA, 345 bp, synthetic construct; identical to SEQ ID NO: 30961
  misc_feature 1..345: note = Description of Artificial Sequence: Synthetic polynucleotide
  source 1..345: mol_type = other DNA

SEQ ID NO: 31042 - protein, 115 aa, synthetic construct; identical to SEQ ID NO: 30962
  REGION 1..115: note = Description of Artificial Sequence: Synthetic polypeptide

SEQ ID NO: 31043 - DNA, 360 bp, synthetic construct; identical to SEQ ID NO: 30985
  misc_feature 1..360: note = Description of Artificial Sequence: Synthetic polynucleotide
  source 1..360: mol_type = other DNA

SEQ ID NO: 31044 - protein, 120 aa, synthetic construct; identical to SEQ ID NO: 30986
  REGION 1..120: note = Description of Artificial Sequence: Synthetic polypeptide

SEQ ID NO: 31045 - DNA, 345 bp, synthetic construct
  misc_feature 1..345: note = Description of Artificial Sequence: Synthetic polynucleotide
  source 1..345: mol_type = other DNA
caggtgcagctacagcagtggggcgcaggactgttgaagccttcggagcccctgtccctcacctgcgctgtctatggtgggtccttcagtgtttcctactggagctggatccgccagcccccagggaaggggctggagtggattggggaaatcaatcatagtggacgcgccaactacaacccgtccctcaagagtcgagtcaccatatcaatagacacgtccaagaaccagttctccctgaagctgagctctgtgaccgccgcggacacggctgtgtattactgtgcgagggactacggtgtccttgactactggggccagggaaccctggtcaccgtctcctca

SEQ ID NO: 31046 - protein, 115 aa, synthetic construct
  REGION 1..115: note = Description of Artificial Sequence: Synthetic polypeptide
QVQLQQWGAGLLKPSEPLSLTCAVYGGSFSVSYWSWIRQPPGKGLEWIGEINHSGRANYNPSLKSRVTISIDTSKNQFSLKLSSVTAADTAVYYCARDYGVLDYWGQGTLVTVSS

SEQ ID NO: 31047 - DNA, 360 bp, synthetic construct; identical to SEQ ID NO: 30985
  misc_feature 1..360: note = Description of Artificial Sequence: Synthetic polynucleotide
  source 1..360: mol_type = other DNA

SEQ ID NO: 31048 - protein, 120 aa, synthetic construct; identical to SEQ ID NO: 30986
  REGION 1..120: note = Description of Artificial Sequence: Synthetic polypeptide

SEQ ID NO: 31049 - DNA, 351 bp, synthetic construct
  misc_feature 1..351: note = Description of Artificial Sequence: Synthetic polynucleotide
  source 1..351: mol_type = other DNA
caggtgcagctggtggagtctgggggaggcgtggtccagcctgggaggtccctgagactctcctgtgcagcgtctggattcaccctcattaactatggcatgcactgggtccgccaggctccaggcaaggggctggagtgggtggcagttatatggtatgatgaaaataataaatactatgtagactccgtgaagggccgattcaccatctccagagacgattccaagaacacgctgtatctgcaaatgaacagcctgagagccgaggactcggctgtgtattactgtgcgagagagacgggtttcttgagcgactactggggccagggaaccctggtcaccgtctcctca

SEQ ID NO: 31050 - protein, 117 aa, synthetic construct
  REGION 1..117: note = Description of Artificial Sequence: Synthetic polypeptide
QVQLVESGGGVVQPGRSLRLSCAASGFTLINYGMHWVRQAPGKGLEWVAVIWYDENNKYYVDSVKGRFTISRDDSKNTLYLQMNSLRAEDSAVYYCARETGFLSDYWGQGTLVTVSS

SEQ ID NO: 31051 - DNA, 369 bp, synthetic construct; identical to SEQ ID NO: 31037
  misc_feature 1..369: note = Description of Artificial Sequence: Synthetic polynucleotide
  source 1..369: mol_type = other DNA

SEQ ID NO: 31052 - protein, 123 aa, synthetic construct; identical to SEQ ID NO: 31038
  REGION 1..123: note = Description of Artificial Sequence: Synthetic polypeptide

SEQ ID NO: 31053 - DNA, 345 bp, synthetic construct; identical to SEQ ID NO: 28135
  misc_feature 1..345: note = Description of Artificial Sequence: Synthetic polynucleotide
  source 1..345: mol_type = other DNA

SEQ ID NO: 31054 - protein, 115 aa, synthetic construct; identical to SEQ ID NO: 28136
  REGION 1..115: note = Description of Artificial Sequence: Synthetic polypeptide

SEQ ID NO: 31055 - DNA, 363 bp, synthetic construct
  misc_feature 1..363: note = Description of Artificial Sequence: Synthetic polynucleotide
  source 1..363: mol_type = other DNA
caggtacagctgcagcagtcaggtccaggactggtgaagccctcgcagaccctctcactcacctgtgccatctccggggacagtgtctctagcaacagtgctgcttggaactggatcaggcagtccccatcgagaggccttgagtggctgggaaggacatactacaggtccaagtggtataattattatccagtatctgtgagaagtcgaataaccatcaacccagacacatccaagaaccagttctccctgctgctgaactctgtgactcccgaggacacggctgtgtattactgtgcaagagatcaacggtactacggtatggacgtctggggccaagggaccacggtcaccgtctcctca

SEQ ID NO: 31056 - protein, 121 aa, synthetic construct
  REGION 1..121: note = Description of Artificial Sequence: Synthetic polypeptide
QVQLQQSGPGLVKPSQTLSLTCAISGDSVSSNSAAWNWIRQSPSRGLEWLGRTYYRSKWYNYYPVSVRSRITINPDTSKNQFSLLLNSVTPEDTAVYYCARDQRYYGMDVWGQGTTVTVSS

SEQ ID NO: 31057 - DNA, 360 bp, synthetic construct; identical to SEQ ID NO: 30985
  misc_feature 1..360: note = Description of Artificial Sequence: Synthetic polynucleotide
  source 1..360: mol_type = other DNA

SEQ ID NO: 31058 - protein, 120 aa, synthetic construct; identical to SEQ ID NO: 30986
  REGION 1..120: note = Description of Artificial Sequence: Synthetic polypeptide

SEQ ID NO: 31059 - DNA, 366 bp, synthetic construct
  misc_feature 1..366: note = Description of Artificial Sequence: Synthetic polynucleotide
  source 1..366: mol_type = other DNA
caggtgcagctggtggagtctgggggaggcgtggtccagcctgggaggtccctgagactctcctgtgcagcgtctggattcaccttcagtagccatggcatgcactgggtccgccaggctccaggcaaggggctggagtgggtggcagttacatggtatgatggaagtgataaatactatgcagactccgtgaagggccgattcaccatctccagagacaattccaagaacacgctgtatctgcaaatgaacagcctgagagccgaggacacggctgtatattactgtgcgcgagaccggctagtgggagctactaccgatgcttttgatatctggggccaagggacaatggtcaccgtctcttca

SEQ ID NO: 31060 - protein, 122 aa, synthetic construct
  REGION 1..122: note = Description of Artificial Sequence: Synthetic polypeptide
QVQLVESGGGVVQPGRSLRLSCAASGFTFSSHGMHWVRQAPGKGLEWVAVTWYDGSDKYYADSVKGRFTISRDNSKNTLYLQMNSLRAEDTAVYYCARDRLVGATTDAFDIWGQGTMVTVSS

SEQ ID NO: 31061 - DNA, 369 bp, synthetic construct
  misc_feature 1..369: note = Description of Artificial Sequence: Synthetic polynucleotide
  source 1..369: mol_type = other DNA
caggttcagctggtgcagtctggagctgaggtgacgaagcctggggcctcagtgaaggtctcctgcaaggcttctggttacacctttaccaacaatggtatcagctgggtgcgacaggcccctggacaagggcttgagtggatgggatggatcaacgcttacaatggtcacacaaactatgcacagaagttccagggcagagtcaccatgaccacagacacatccacgagcacagcctacatggagctgaggagcctgagatctgacgacacggccgtgtattactgtgcgagagatcctacggtgacccactactattactacggtatggacgtctggggccaagggaccacggtcaccgtctcctca

SEQ ID NO: 31062 - protein, 123 aa, synthetic construct
  REGION 1..123: note = Description of Artificial Sequence: Synthetic polypeptide
QVQLVQSGAEVTKPGASVKVSCKASGYTFTNNGISWVRQAPGQGLEWMGWINAYNGHTNYAQKFQGRVTMTTDTSTSTAYMELRSLRSDDTAVYYCARDPTVTHYYYYGMDVWGQGTTVTVSS

SEQ ID NO: 31063 - DNA, 360 bp, synthetic construct
  misc_feature 1..360: note = Description of Artificial Sequence: Synthetic polynucleotide
  source 1..360: mol_type = other DNA
caggtgcagctggtggggtctgggggaggcgtggtccagcctgggaggtccctgagactctcctgtgcagcgtctggattcaccttcagtagctatggcatgcactgggtccgccaggctccaggcaaggggctggaatgggtggcagttctttggtttgatggaagtaatagaaactatgcagactccgtgaagggccgattcaccatctccagagacaattccaagaacacgctgtatctgcaaatgaacagcctgagagccgaggacacggctgtgtattactgtgcgagagatcggggagtgggctactacggtacggacgtctggggccaagggaccacggtcaccgtctcctca

SEQ ID NO: 31064 - protein, 120 aa, synthetic construct
  REGION 1..120: note = Description of Artificial Sequence: Synthetic polypeptide
QVQLVGSGGGVVQPGRSLRLSCAASGFTFSSYGMHWVRQAPGKGLEWVAVLWFDGSNRNYADSVKGRFTISRDNSKNTLYLQMNSLRAEDTAVYYCARDRGVGYYGTDVWGQGTTVTVSS

SEQ ID NO: 31065 - DNA, 360 bp, synthetic construct
  misc_feature 1..360: note = Description of Artificial Sequence: Synthetic polynucleotide
  source 1..360: mol_type = other DNA
caggtgcagctggtggagtctgggggaggcgtggtccagcctgggaggtccctgagactctcctgtgcagtgtctggaatcaccttcagtagttatggcatgcactgggcccgccaggctccaggcaaggggctggagtgggtggcagttatatggtatgatggaagtaataaaaactatgaagactccgtgaagggccgattcaccatctccagagacaactccaagaacacgctgtatctgcaaatgaacagcctgagagccgaggacacggctgtgtattactgtgcgagagatgggagttatggttacgacggtatggacgtctggggccaagggaccacggtcaccgtctcctca

SEQ ID NO: 31066 - protein, 120 aa, synthetic construct
  REGION 1..120: note = Description of Artificial Sequence: Synthetic polypeptide
QVQLVESGGGVVQPGRSLRLSCAVSGITFSSYGMHWARQAPGKGLEWVAVIWYDGSNKNYEDSVKGRFTISRDNSKNTLYLQMNSLRAEDTAVYYCARDGSYGYDGMDVWGQGTTVTVSS

SEQ ID NO: 31067 - DNA, 360 bp, synthetic construct
  misc_feature 1..360: note = Description of Artificial Sequence: Synthetic polynucleotide
  source 1..360: mol_type = other DNA
caggtgcagctggtggagtctgggggaggcgtggtccagcctgggaggtccctgagactctcctgtgcagcgtctggattcaccttcagtaactatggcatgcactgggtccgccaggctccaggcaaggggctggagtgggtggcagttatatggcatgatggaagtaataaatactatgcagactccgtgaagggccgattcaccatctccagagacaattccaagaacacgctgtatctgcaaatgaacagcctgagagccgaggacacggctgtgtattactgtgcgaggttagactacagtaactacgggtggttcgacccctggggccagggaaccctggtcaccgtctcctca

SEQ ID NO: 31068 - protein, 120 aa, synthetic construct
  REGION 1..120: note = Description of Artificial Sequence: Synthetic polypeptide
QVQLVESGGGVVQPGRSLRLSCAASGFTFSNYGMHWVRQAPGKGLEWVAVIWHDGSNKYYADSVKGRFTISRDNSKNTLYLQMNSLRAEDTAVYYCARLDYSNYGWFDPWGQGTLVTVSS

SEQ ID NO: 31069 - DNA, 360 bp, synthetic construct
  misc_feature 1..360: note = Description of Artificial Sequence: Synthetic polynucleotide
  source 1..360: mol_type = other DNA
caggtgcagctggtggagtctgggggaggcgtggtccagcctgggaggtccctgagactctcctgtgcagcgtctggattcaccttcagtagctatggcatgcactgggtccgccaggctccaggcaaggggctggagtgggtggcagttatatggtatgatggaagtaataaaaactatgcagactccgtgaagggccgattcaccatctccagagacaactccaagaacacgctgtatctgcaaatgaacagcctgagagccgaggacacggctgtgttttactgtgcgagagataggacggtgggctatgatggttttgatatctggggccaagggacaatggtcaccgtctcttca

SEQ ID NO: 31070 - protein, 120 aa, synthetic construct
  REGION 1..120: note = Description of Artificial Sequence: Synthetic polypeptide
QVQLVESGGGVVQPGRSLRLSCAASGFTFSSYGMHWVRQAPGKGLEWVAVIWYDGSNKNYADSVKGRFTISRDNSKNTLYLQMNSLRAEDTAVFYCARDRTVGYDGFDIWGQGTMVTVSS

SEQ ID NO: 31071 - DNA, 360 bp, synthetic construct
  misc_feature 1..360: note = Description of Artificial Sequence: Synthetic polynucleotide
  source 1..360: mol_type = other DNA
caggtgcagctggtggagtctgggggaggcgtggtccagcctgggaggtccctgagactctcctgtgcagcgtctggattcaccttcagtagctatggcatgcactgggtccgccaggctccaggcaaggggctggagtgggtggcagttatatggtatgatggaagtaatgaacactatgcagactccgtgaagggccgattcaccatctccagagacaattccaagaaaacgctgtatctgcaaatgaacagcctgagagccgaggacacggctgtgtattactgtgcgagagaccacggtgtcgggtactacggtatggacgtctggggccaagggaccacggtcaccgtctcctca

SEQ ID NO: 31072 - protein, 120 aa, synthetic construct
  REGION 1..120: note = Description of Artificial Sequence: Synthetic polypeptide
QVQLVESGGGVVQPGRSLRLSCAASGFTFSSYGMHWVRQAPGKGLEWVAVIWYDGSNEHYADSVKGRFTISRDNSKKTLYLQMNSLRAEDTAVYYCARDHGVGYYGMDVWGQGTTVTVSS

SEQ ID NO: 31073 - DNA, 369 bp, synthetic construct
  misc_feature 1..369: note = Description of Artificial Sequence: Synthetic polynucleotide
  source 1..369: mol_type = other DNA
caggttcagctggtgcagtctggagctgaggtgaagaagcctggggcctcagtgaaggtctcctgcaaggcttctggttacacctttaccaggcatggtatcagctgggtgcgactggcccctggacaagggcttgagtggatgggatggatcagcgcttacaatggtctcacaaactatgcacagaagttccagggcagagtcaccatgaccacagacacatccacgagcacaggctacatggagctgcggagcctgagatctgacgacacggccgtgtattactgtgcgagagatcctacggtgacccactactactactacggtatggacgtctggggccaagggaccacggtcaccgtctcctca

SEQ ID NO: 31074 - protein, 123 aa, synthetic construct
  REGION 1..123: note = Description of Artificial Sequence: Synthetic polypeptide
QVQLVQSGAEVKKPGASVKVSCKASGYTFTRHGISWVRLAPGQGLEWMGWISAYNGLTNYAQKFQGRVTMTTDTSTSTGYMELRSLRSDDTAVYYCARDPTVTHYYYYGMDVWGQGTTVTVSS

SEQ ID NO: 31075 - DNA, 360 bp, synthetic construct
  misc_feature 1..360: note = Description of Artificial Sequence: Synthetic polynucleotide
  source 1..360: mol_type = other DNA
caggtgcagctggtggagtctgggggaggcgtggtccagcctgggaggtccctgagactctcctgtgcagcgtctggattcaccttcagtagctatggcatgcactgggtccgccaggctccaggcaaggggctggagtgggtggcagttatatggtatgatggaagtaataaaaactatgtagactccgtgaagggccgattcaccatctccagagacaattccaagaacacgctgtatctgcaaatgaacagcctgagagccgaggacacggctgtgtattactgtgcgagagactacggtgtcgggtactacggtacggacgtctggggccaagggaccacggtcaccgtctcctca

SEQ ID NO: 31076 - protein, 120 aa, synthetic construct
  REGION 1..120: note = Description of Artificial Sequence: Synthetic polypeptide
QVQLVESGGGVVQPGRSLRLSCAASGFTFSSYGMHWVRQAPGKGLEWVAVIWYDGSNKNYVDSVKGRFTISRDNSKNTLYLQMNSLRAEDTAVYYCARDYGVGYYGTDVWGQGTTVTVSS

SEQ ID NO: 31077 - DNA, 360 bp, synthetic construct
  misc_feature 1..360: note = Description of Artificial Sequence: Synthetic polynucleotide
  source 1..360: mol_type = other DNA
caggtgcagctggtggagtctgggggaggcgtggtccagcctgggaggtccctgagactctcctgtgcagcgtctggattcaccttcagtagctatggcatgcactgggtccgccaggctccaggcaaggggctggagtgggtggcagttatatggtatgatggaagtaataaaaattatgcagactccgtgaagggccgattcaccatctccagagacaattccaagaacacgctgtctctgcaaatgaacagcctgagagccgaggacacggctgtgtattactgtgcgagagactacggtgtcgggtactacggtacggacgtctggggccaagggaccacggtcaccgtctcctca

SEQ ID NO: 31078 - protein, 120 aa, synthetic construct
  REGION 1..120: note = Description of Artificial Sequence: Synthetic polypeptide
QVQLVESGGGVVQPGRSLRLSCAASGFTFSSYGMHWVRQAPGKGLEWVAVIWYDGSNKNYADSVKGRFTISRDNSKNTLSLQMNSLRAEDTAVYYCARDYGVGYYGTDVWGQGTTVTVSS

SEQ ID NO: 31079 - DNA, 360 bp, synthetic construct; identical to SEQ ID NO: 31071
  misc_feature 1..360: note = Description of Artificial Sequence: Synthetic polynucleotide
  source 1..360: mol_type = other DNA

SEQ ID NO: 31080 - protein, 120 aa, synthetic construct; identical to SEQ ID NO: 31072
  REGION 1..120: note = Description of Artificial Sequence: Synthetic polypeptide

SEQ ID NO: 31081 - DNA, 363 bp, synthetic construct
  misc_feature 1..363: note = Description of Artificial Sequence: Synthetic polynucleotide
  source 1..363: mol_type = other DNA
caggtgcagctggtggagtctgggggaggcgtggtccagcctgggaggtccctgagactctcctgtgcagcgtctggattcaccttcagtagctatggcatgcactgggtccgccaggctccaggcaaggggctggaatgggtgacagctatatggtatgatggaagtcataaatactatacagattccgtgaagggccgattcaccatctccagagacaattccaagaacacgctgtatctgcaaatgaacagcctgagagccgaggacacggctgtgtattactgtgcgagagatcggagtatagtgggagctacctactttgactactggggccagggaaccctggtcaccgtctcctca

SEQ ID NO: 31082 - protein, 121 aa, synthetic construct
  REGION 1..121: note = Description of Artificial Sequence: Synthetic polypeptide
QVQLVESGGGVVQPGRSLRLSCAASGFTFSSYGMHWVRQAPGKGLEWVTAIWYDGSHKYYTDSVKGRFTISRDNSKNTLYLQMNSLRAEDTAVYYCARDRSIVGATYFDYWGQGTLVTVSS

SEQ ID NO: 31083 - DNA, 360 bp, synthetic construct
  misc_feature 1..360: note = Description of Artificial Sequence: Synthetic polynucleotide
  source 1..360: mol_type = other DNA
caggtgcagctggtggagtctgggggaggcgtggtccagcctgggaggtccctgagactctcctgtgcagcgtctggattcaccttcagtagatatggcatgcactgggtccgccaggctccaggcaaggggctggagtgggtggcagttatatggtatgatggaagtaataaacactatgcagactccgtgaagggccgattcaccatctccagagacaattccaagaatacgttgtatctgcaaatgaacagtctgagaggcgaggacacggctgtgtattactgtgcgagagatcggggagtgggctacaacggtatggacgtctggggccaagggaccacggtcaccgtctcctca

SEQ ID NO: 31084 - protein, 120 aa, synthetic construct
  REGION 1..120: note = Description of Artificial Sequence: Synthetic polypeptide
QVQLVESGGGVVQPGRSLRLSCAASGFTFSRYGMHWVRQAPGKGLEWVAVIWYDGSNKHYADSVKGRFTISRDNSKNTLYLQMNSLRGEDTAVYYCARDRGVGYNGMDVWGQGTTVTVSS

SEQ ID NO: 31085 - DNA, 369 bp, synthetic construct
  misc_feature 1..369: note = Description of Artificial Sequence: Synthetic polynucleotide
  source 1..369: mol_type = other DNA
caggtgcagctggtggagtctgggggaggcgtggtccagcctgggaggtccctgagactctcctgtgcagcgtctggattcaccttcagtgactatgtcatgcactgggtccgccaggctccaggcaaggggctggagtgggtgacagttatatggtatgatggaagtaataaatattatgcagactccgtgaagggccgattcaccatctccagagacaattccaagaacacgctgtatctgcaaatgaacagcctgagagccgaggacacggctgtgtattactgtgcgagagaacgttatagcagtggctggtacgactacggtatggacgtctggggccaagggaccacggtcaccgtctcctca

SEQ ID NO: 31086 - protein, 123 aa, synthetic construct
  REGION 1..123: note = Description of Artificial Sequence: Synthetic polypeptide
QVQLVESGGGVVQPGRSLRLSCAASGFTFSDYVMHWVRQAPGKGLEWVTVIWYDGSNKYYADSVKGRFTISRDNSKNTLYLQMNSLRAEDTAVYYCARERYSSGWYDYGMDVWGQGTTVTVSS

SEQ ID NO: 31087 - DNA, 360 bp, synthetic construct; identical to SEQ ID NO: 31065
  misc_feature 1..360: note = Description of Artificial Sequence: Synthetic polynucleotide
  source 1..360: mol_type = other DNA

SEQ ID NO: 31088 - protein, 120 aa, synthetic construct; identical to SEQ ID NO: 31066
  REGION 1..120: note = Description of Artificial Sequence: Synthetic polypeptide

SEQ ID NO: 31089 - DNA, 360 bp, synthetic construct; identical to SEQ ID NO: 31077
  misc_feature 1..360: note = Description of Artificial Sequence: Synthetic polynucleotide
  source 1..360: mol_type = other DNA

SEQ ID NO: 31090 - protein, 120 aa, synthetic construct; identical to SEQ ID NO: 31078
  REGION 1..120: note = Description of Artificial Sequence: Synthetic polypeptide

SEQ ID NO: 31091 - DNA, 360 bp, synthetic construct
  misc_feature 1..360: note = Description of Artificial Sequence: Synthetic polynucleotide
  source 1..360: mol_type = other DNA
caggtgcagctggtggagtctgggggaggcgtggtccagcctgggaggtccctgagactctcctgtgcagcgtctggattcaccttcagtagctatggcatgcactgggtccgccaggctccaggcaaggggctggagtgggtggcagttatatggtatgatggaagtaataaaaactatgcagactccgtgaagggccgattcaccatctccagagacaactccaagaacacgctgtatctgcaaatgaacagcctgagagccgaggacacggctgtgtattactgtgcgagagataggacggtgggctatgatggttttgatatctggggccaagggacaatggtcaccgtctcttca

SEQ ID NO: 31092 - protein, 120 aa, synthetic construct
  REGION 1..120: note = Description of Artificial Sequence: Synthetic polypeptide
QVQLVESGGGVVQPGRSLRLSCAASGFTFSSYGMHWVRQAPGKGLEWVAVIWYDGSNKNYADSVKGRFTISRDNSKNTLYLQMNSLRAEDTAVYYCARDRTVGYDGFDIWGQGTMVTVSS

SEQ ID NO: 31093 - DNA, 360 bp, synthetic construct
  misc_feature 1..360: note = Description of Artificial Sequence: Synthetic polynucleotide
  source 1..360: mol_type = other DNA
caggtgcagttggtggagtctgggggaggcgtggtccagcctgggaggtccctgagactctcctgtgcaacgtctggattcaccttcagtagctatggcatgcactgggtccgccaggctccaggcaaggggctggagtgggtggcagttatatggtatgatggaagtaataaacactatgcagactccgtgaagggccgattcaccatctccagagacaattccaagaacacgctgtatctgcaaatgaacagcctgagagccgaggacacggctgtgtattactgtgcgagagactacggtgtcgggtacgacggtatggacgtctggggccaagggaccacggtcaccgtctcctca

SEQ ID NO: 31094 - protein, 120 aa, synthetic construct
  REGION 1..120: note = Description of Artificial Sequence: Synthetic polypeptide
QVQLVESGGGVVQPGRSLRLSCATSGFTFSSYGMHWVRQAPGKGLEWVAVIWYDGSNKHYADSVKGRFTISRDNSKNTLYLQMNSLRAEDTAVYYCARDYGVGYDGMDVWGQGTTVTVSS

SEQ ID NO: 31095 - DNA, 360 bp, synthetic construct; identical to SEQ ID NO: 31065
  misc_feature 1..360: note = Description of Artificial Sequence: Synthetic polynucleotide
  source 1..360: mol_type = other DNA

SEQ ID NO: 31096 - protein, 120 aa, synthetic construct; identical to SEQ ID NO: 31066
  REGION 1..120: note = Description of Artificial Sequence: Synthetic polypeptide

SEQ ID NO: 31097 - DNA, 360 bp, synthetic construct
  misc_feature 1..360: note = Description of Artificial Sequence: Synthetic polynucleotide
  source 1..360: mol_type = other DNA
caggtgcagctggtggagtctgggggaggcgtggtccagcctgggaggtccctgagactctcctgtgcagcgtctggattcaccttcagtagctatggcatgcactgggtccgccaggctccaggcaaggggctggagtgggtggcagttatatggtatgatggaagtaataaacactatgcagactccgtgaagggccgattcaccatctccagagacaattccaagaacacgctgtatctgcaaatgaacagcctgagagccgaggacacggctgtgtattactgtgcgagagactacggtgtcgggtactacggtacggacgtctggggccaagggaccacggtcaccgtctcctca

SEQ ID NO: 31098 - protein, 120 aa, synthetic construct
  REGION 1..120: note = Description of Artificial Sequence: Synthetic polypeptide
QVQLVESGGGVVQPGRSLRLSCAASGFTFSSYGMHWVRQAPGKGLEWVAVIWYDGSNKHYADSVKGRFTISRDNSKNTLYLQMNSLRAEDTAVYYCARDYGVGYYGTDVWGQGTTVTVSS

SEQ ID NO: 31099 - DNA, 354 bp, synthetic construct
  misc_feature 1..354: note = Description of Artificial Sequence: Synthetic polynucleotide
  source 1..354: mol_type = other DNA
caggtgcagctggtgcagtctggggctgaggtgaagaagcctggggcctcagtgaaggtctcctgcaaggcttctggatacaccttcaccggctaccatatgcactgggtgcgacaggcccctggacaagggcttgagtggatgggatggatcaatcctaagagtgatggcacaaactatgcacagaagtttcagggcagggtcaccatgaccagggacacgtccatcagcacagcctacatggagctgagcaggctgagatctgacgacacggccgtgtattactgtgcgagagaaaagcctgggagctactacaaatactggggccagggaaccctggtcaccgtctcctca

SEQ ID NO: 31100 - protein, 118 aa, synthetic construct
  REGION 1..118: note = Description of Artificial Sequence: Synthetic polypeptide
QVQLVQSGAEVKKPGASVKVSCKASGYTFTGYHMHWVRQAPGQGLEWMGWINPKSDGTNYAQKFQGRVTMTRDTSISTAYMELSRLRSDDTAVYYCAREKPGSYYKYWGQGTLVTVSS

SEQ ID NO: 31101 - DNA, 351 bp, synthetic construct
  misc_feature 1..351: note = Description of Artificial Sequence: Synthetic polynucleotide
  source 1..351: mol_type = other DNA
caggttcagctggtgcagtctggagctgaggtgaagaagcctggggcctcagtgaaggtctcctgcaaggcttctggtttcacctttaccagctatggtatcaactgggtgcgacaggcccctggacaagggcttgagtggatgggatggatcagcgttcacaatggtaacacagactatgcacagaagttccagggcagagtcaccatgaccacagacacatccacgagcacagcctacatggaactgaggagcctgagatctgacgacacggccgtgtattactgtgcgagagactactactacggtatggacgtctggggccaagggaccaaggtcaccgtctcctca

SEQ ID NO: 31102 - protein, 117 aa, synthetic construct
  REGION 1..117: note = Description of Artificial Sequence: Synthetic polypeptide
QVQLVQSGAEVKKPGASVKVSCKASGFTFTSYGINWVRQAPGQGLEWMGWISVHNGNTDYAQKFQGRVTMTTDTSTSTAYMELRSLRSDDTAVYYCARDYYYGMDVWGQGTKVTVSS

SEQ ID NO: 31103 - DNA, 360 bp, synthetic construct
  misc_feature 1..360: note = Description of Artificial Sequence: Synthetic polynucleotide
  source 1..360: mol_type = other DNA
caggtgcagctggtggagtctgggggaggcgtggtccagcctgggaggtccctgagactctcctgtgaagcgtctggattcaccttcagtagctatggcatgcactgggtccgccaggctccaggcaaggggctggagtgggtggcagttatatggtatgatggaagtaataaaaactatggagactccgtgaagggccgattcaccatctccagagacaattccaagaatacgctgtatctgcaaatgaacagcctgagagccgaggacacggctgtgtattactgtgcgagagatcggggagtgggctacgacggaatggacgtctggggccaagggaccacggtcaccgtctcctca

SEQ ID NO: 31104 - protein, 120 aa, synthetic construct
  REGION 1..120: note = Description of Artificial Sequence: Synthetic polypeptide
QVQLVESGGGVVQPGRSLRLSCEASGFTFSSYGMHWVRQAPGKGLEWVAVIWYDGSNKNYGDSVKGRFTISRDNSKNTLYLQMNSLRAEDTAVYYCARDRGVGYDGMDVWGQGTTVTVSS

SEQ ID NO: 31105 - DNA, 360 bp, synthetic construct
  misc_feature 1..360: note = Description of Artificial Sequence: Synthetic polynucleotide
  source 1..360: mol_type = other DNA
caggtgcagctggtggagtctgggggaggcgtggtccagcctgggaggtccctgagactctcctgtgcagcgtctggattcaccttcagtagctatggcatgcactgggtccgccaggctccaggcaaggggctggagtgggtggcagttatatggtatgatggaagtaatgaaaactatgcagactccgtgaagggccgaatcaccatctccagagacaattccaagaacacgctgtatctgcaaatgaacagcctgagagccgaggacacggctgtgtattactgtgcgagagataggacggtgggctatgatggttgtgatatctggggccaaggggcaatggtcaccgtctcttca

SEQ ID NO: 31106 - protein, 120 aa, synthetic construct
  REGION 1..120: note = Description of Artificial Sequence: Synthetic polypeptide
QVQLVESGGGVVQPGRSLRLSCAASGFTFSSYGMHWVRQAPGKGLEWVAVIWYDGSNENYADSVKGRITISRDNSKNTLYLQMNSLRAEDTAVYYCARDRTVGYDGCDIWGQGAMVTVSS

SEQ ID NO: 31107 - DNA, 366 bp, synthetic construct
  misc_feature 1..366: note = Description of Artificial Sequence: Synthetic polynucleotide
  source 1..366: mol_type = other DNA
caggtccagctggtgcagtctggggctgaggtgaagaagcctggggcctcagtgaaggtctcctgcaaggcttctggatacaccttcaccggccactatatacactgggtgcgacaggcccctggacaagggcttgagtggatgggatggatcaactctaacagtggtggcacaaactatgcacagaagtttcagggcagggtcaccatgaccagggacacgtccatcagcacagcctacatggagctgagcaggctgagatctgacgacacggccgtatattactgtgcgaaagacgggagatacagctatggttacgactggttcgacccctggggccagggaaccctggtcaccgtctcctca

SEQ ID NO: 31108 - protein, 122 aa, synthetic construct
  REGION 1..122: note = Description of Artificial Sequence: Synthetic polypeptide
QVQLVQSGAEVKKPGASVKVSCKASGYTFTGHYIHWVRQAPGQGLEWMGWINSNSGGTNYAQKFQGRVTMTRDTSISTAYMELSRLRSDDTAVYYCAKDGRYSYGYDWFDPWGQGTLVTVSS

SEQ ID NO: 31109 - DNA, 360 bp, synthetic construct
  misc_feature 1..360: note = Description of Artificial Sequence: Synthetic polynucleotide
  source 1..360: mol_type = other DNA
caggtgcagttggtggagtctgggggaggcgtggtccagcctgggaggtccctgagactctcctgtgcagcgtctggattcaccttcagtagctatggcatgcactgggtccgccaggctccaggcaaggggctggagtgggtggcagttatatggtatgatggaagtaataaatactatgcagactccgtgaagggccgattcaccatctccagagacaattccaagaacacgctgtctctgcaaatgaacagcctgagagccgaggacacggctgtgtattactgtgcgagagactacggtgtcgggtactacggtacggacgtctggggccaagggaccacggtcaccgtctcctca

SEQ ID NO: 31110 - protein, 120 aa, synthetic construct
  REGION 1..120: note = Description of Artificial Sequence: Synthetic polypeptide
QVQLVESGGGVVQPGRSLRLSCAASGFTFSSYGMHWVRQAPGKGLEWVAVIWYDGSNKYYADSVKGRFTISRDNSKNTLSLQMNSLRAEDTAVYYCARDYGVGYYGTDVWGQGTTVTVSS

SEQ ID NO: 31111 - DNA, 369 bp, synthetic construct
  misc_feature 1..369: note = Description of Artificial Sequence: Synthetic polynucleotide
  source 1..369: mol_type = other DNA
caggtgcagctggtggagtctgggggaggcgtggtccagcctgggaggtccctgagactctcctgtgcagcgtctggattcaccttcagtagctatgtcatgcactgggtccgccaggctccaggcaaggggctggagtgggtggcagttatatggtatgatggaagtaataaatactatgcagactccgtgaagggccgattcaccatctccagagacaattccaagaacacgctgtatctgcaaatgaacagcctgagagccgaggacacggctgtattttactgtgcgagagagaggtataccagcagctggtacgactacggtatggacgtctggggccaagggaccacggtcaccgtctcctca

SEQ ID NO: 31112 - protein, 123 aa, synthetic construct
  REGION 1..123: note = Description of Artificial Sequence: Synthetic polypeptide
QVQLVESGGGVVQPGRSLRLSCAASGFTFSSYVMHWVRQAPGKGLEWVAVIWYDGSNKYYADSVKGRFTISRDNSKNTLYLQMNSLRAEDTAVFYCARERYTSSWYDYGMDVWGQGTTVTVSS

SEQ ID NO: 31113 - DNA, 369 bp, synthetic construct; identical to SEQ ID NO: 31085
  misc_feature 1..369: note = Description of Artificial Sequence: Synthetic polynucleotide
  source 1..369: mol_type = other DNA

SEQ ID NO: 31114 - protein, 123 aa, synthetic construct; identical to SEQ ID NO: 31086
  REGION 1..123: note = Description of Artificial Sequence: Synthetic polypeptide

SEQ ID NO: 31115 - DNA, 369 bp, synthetic construct; identical to SEQ ID NO: 31085
  misc_feature 1..369: note = Description of Artificial Sequence: Synthetic polynucleotide
  source 1..369: mol_type = other DNA

SEQ ID NO: 31116 - protein, 123 aa, synthetic construct; identical to SEQ ID NO: 31086
  REGION 1..123: note = Description of Artificial Sequence: Synthetic polypeptide

SEQ ID NO: 31117 - DNA, 369 bp, synthetic construct
  misc_feature 1..369: note = Description of Artificial Sequence: Synthetic polynucleotide
  source 1..369: mol_type = other DNA
caggtgcagctggtggagtctgggggaggcgtggtccagcctgggaggtccctgagactctcctgtgcagcgtctggattcaccttcagtgactatgtcatacactgggtccgccaggctccaggcaaggggctggagtgggtgacagttatatggtatgatggaagtaataaatattatgcagactccgtgaagggccgattcaccatctccagagacaattccaagaacacgctgtatctgcaaatgaacagtgtgagagccgaggacacggctgtgtattactgtgcgagagaacgttatagcagtggctggtacgactacggtatggacgtctggggccaagggaccacggtcaccgtctcctca

SEQ ID NO: 31118 - protein, 123 aa, synthetic construct
  REGION 1..123: note = Description of Artificial Sequence: Synthetic polypeptide
QVQLVESGGGVVQPGRSLRLSCAASGFTFSDYVIHWVRQAPGKGLEWVTVIWYDGSNKYYADSVKGRFTISRDNSKNTLYLQMNSVRAEDTAVYYCARERYSSGWYDYGMDVWGQGTTVTVSS

SEQ ID NO: 31119 - DNA, 360 bp, synthetic construct; identical to SEQ ID NO: 31077
  misc_feature 1..360: note = Description of Artificial Sequence: Synthetic polynucleotide
  source 1..360: mol_type = other DNA

SEQ ID NO: 31120 - protein, 120 aa, synthetic construct; identical to SEQ ID NO: 31078
  REGION 1..120: note = Description of Artificial Sequence: Synthetic polypeptide

SEQ ID NO: 31121 - DNA, 360 bp, synthetic construct
  misc_feature 1..360: note = Description of Artificial Sequence: Synthetic polynucleotide
  source 1..360: mol_type = other DNA
caggtgcagctggtggagtctgggggaggcgtggtccagcctgggaggtccctgagactctcctgtgcagcgtctggattcaccttcagtagctatggcatgcactgggtccgccaggctccaggcaaggggctggagtgggtggcagttatatggtatgatggaagtaataaaaactatgcagattccgtgaagggccgattcaccatctccagagacaattccaagaacacactgtatctgcaaatgaacagcctgagagccgaggacacggctgtgtattactgtgcgagagactgcggtgtcggatactacggtacggacgtctggggccaagggaccacggtcaccgtctcctca

SEQ ID NO: 31122 - protein, 120 aa, synthetic construct
  REGION 1..120: note = Description of Artificial Sequence: Synthetic polypeptide
QVQLVESGGGVVQPGRSLRLSCAASGFTFSSYGMHWVRQAPGKGLEWVAVIWYDGSNKNYADSVKGRFTISRDNSKNTLYLQMNSLRAEDTAVYYCARDCGVGYYGTDVWGQGTTVTVSS

SEQ ID NO: 31123 - DNA, 366 bp, synthetic construct
  misc_feature 1..366: note = Description of Artificial Sequence: Synthetic polynucleotide
  source 1..366: mol_type = other DNA
caggtgcagctggtgcagtctggggctgaggtgaagaagcctggggcctcagtgaaggtctcctgcaaggcttctggatacaccttcaccggccactatatacactgggtgcgacaggcccctggacaagggcttgagtggatgggatggatcaactctaacagtggtggcacaaattatgcagagaagtttcagggcagggtcaccatgaccagggacacgtccatcagcacagcctacatggagctgagcaggctgagatctgacgacacggccgtgtattactgtgcgaaagacgggagatacagctatggtcacgactggttcgacccctggggccagggaaccctggtcaccgtctcctca

SEQ ID NO: 31124 - protein, 122 aa, synthetic construct
  REGION 1..122: note = Description of Artificial Sequence: Synthetic polypeptide
QVQLVQSGAEVKKPGASVKVSCKASGYTFTGHYIHWVRQAPGQGLEWMGWINSNSGGTNYAEKFQGRVTMTRDTSISTAYMELSRLRSDDTAVYYCAKDGRYSYGHDWFDPWGQGTLVTVSS

SEQ ID NO: 31125 - DNA, 360 bp, synthetic construct
  misc_feature 1..360: note = Description of Artificial Sequence: Synthetic polynucleotide
  source 1..360: mol_type = other DNA
caggtgcagctggtggagtctgggggaggcgtggtccagcctgggaggtccctgagactctcctgtgcagcgtctggattcaccttcagttactatggcatgcactgggtccgccaggctccaggcaaggggctggagtgggtggcagttatatggcatgatggaagtaataaatactatgcagactccgtgaagggccgattcaccatctccagagacaattccaagaacacgctgtatctgcaaatgaacagcctgagagccgaggacacggctgtgtattactgtgcgaggttagactacagtaattacgggtggttcgacccctggggccagggaaccctggtcaccgtctcctca

SEQ ID NO: 31126 - protein, 120 aa, synthetic construct
  REGION 1..120: note = Description of Artificial Sequence: Synthetic polypeptide
QVQLVESGGGVVQPGRSLRLSCAASGFTFSYYGMHWVRQAPGKGLEWVAVIWHDGSNKYYADSVKGRFTISRDNSKNTLYLQMNSLRAEDTAVYYCARLDYSNYGWFDPWGQGTLVTVSS

SEQ ID NO: 31127 - DNA, 369 bp, synthetic construct; identical to SEQ ID NO: 31085
  misc_feature 1..369: note = Description of Artificial Sequence: Synthetic polynucleotide
  source 1..369: mol_type = other DNA

SEQ ID NO: 31128 - protein, 123 aa, synthetic construct; identical to SEQ ID NO: 31086
  REGION 1..123: note = Description of Artificial Sequence: Synthetic polypeptide

SEQ ID NO: 31129 - DNA, 360 bp, synthetic construct
  misc_feature 1..360: note = Description of Artificial Sequence: Synthetic polynucleotide
  source 1..360: mol_type = other DNA
caggtgcaactggtggagtctgggggaggcgtggtccagcctgggaggtccctgagactctcctgtgcagcgtctggactcaccttcagtagctatggcatgcactgggtccgccaggctccaggcaaggggctggagtgggtggcagttatatggtatgatggaagtaatgaacactatgcagactccgtgaagggccgattcaccatctccagagacaattccaagaacacgctgtatctgcaaatgaacagcctgagagccgaggacacggctgtgtattactgtgcgagagatcggggagtgggctactacggtatggacgtctggggccaagggaccacggtcaccgtctcctca

SEQ ID NO: 31130 - protein, 120 aa, synthetic construct
  REGION 1..120: note = Description of Artificial Sequence: Synthetic polypeptide
QVQLVESGGGVVQPGRSLRLSCAASGLTFSSYGMHWVRQAPGKGLEWVAVIWYDGSNEHYADSVKGRFTISRDNSKNTLYLQMNSLRAEDTAVYYCARDRGVGYYGMDVWGQGTTVTVSS

SEQ ID NO: 31131 - DNA, 360 bp, synthetic construct; identical to SEQ ID NO: 31067
  misc_feature 1..360: note = Description of Artificial Sequence: Synthetic polynucleotide
  source 1..360: mol_type = other DNA

SEQ ID NO: 31132 - protein, 120 aa, synthetic construct; identical to SEQ ID NO: 31068
  REGION 1..120: note = Description of Artificial Sequence: Synthetic polypeptide

SEQ ID NO: 31133 - DNA, 363 bp, synthetic construct
  misc_feature 1..363: note = Description of Artificial Sequence: Synthetic polynucleotide
  source 1..363: mol_type = other DNA
caggtgcagctggtggagtcggggggaggcgtggtccagcctgggaggtccctgagactctcctgtgcagcgtctggattcaccttcagtagctatggcatgcactgggtccgccaggctccaggcaaggggctggagtgggtggcagctatatggtatgatggaagtaataaatactatgcagactccgtgaagggccgattcaccatctccagagacaattccaagcgcacgctgtatctgcagatgaacagcctgagagccgaggacacggctgtgtattactgtgcgagagatcccaacatagtgggagctacttggtttgactactggggccagggaaccctggtcaccgtctcctca

SEQ ID NO: 31134 - protein, 121 aa, synthetic construct
  REGION 1..121: note = Description of Artificial Sequence: Synthetic polypeptide
QVQLVESGGGVVQPGRSLRLSCAASGFTFSSYGMHWVRQAPGKGLEWVAAIWYDGSNKYYADSVKGRFTISRDNSKRTLYLQMNSLRAEDTAVYYCARDPNIVGATWFDYWGQGTLVTVSS

SEQ ID NO: 31135 - DNA, 351 bp, synthetic construct
  misc_feature 1..351: note = Description of Artificial Sequence: Synthetic polynucleotide
  source 1..351: mol_type = other DNA
gaggtacagctggtggagtctgggggaggcttggtacagcctggggggtccctgagactctcctgtgcagcctctggattctccttcagaagctatagcatgaactgggtccgccaggctccagggaaggggctggagtgggtttcatacattactggtagtagtagtaccatatactacgcagactctgtgaagggccgattcaccatctccagagacaatgccaagaactcactgtatctgcaaatgaacagcctgagagacgaggacacggctgtgtattactgtgcgagatcgggtttagcagtggaggactactggggccagggaaccctggtcaccgtctcctca

SEQ ID NO: 31136 - protein, 117 aa, synthetic construct
  REGION 1..117: note = Description of Artificial Sequence: Synthetic polypeptide
EVQLVESGGGLVQPGGSLRLSCAASGFSFRSYSMNWVRQAPGKGLEWVSYITGSSSTIYYADSVKGRFTISRDNAKNSLYLQMNSLRDEDTAVYYCARSGLAVEDYWGQGTLVTVSS

SEQ ID NO: 31137 - DNA, 369 bp, synthetic construct; identical to SEQ ID NO: 31085
  misc_feature 1..369: note = Description of Artificial Sequence: Synthetic polynucleotide
  source 1..369: mol_type = other DNA

SEQ ID NO: 31138 - protein, 123 aa, synthetic construct; identical to SEQ ID NO: 31086
  REGION 1..123: note = Description of Artificial Sequence: Synthetic polypeptide

SEQ ID NO: 31139 - DNA, 369 bp, synthetic construct; identical to SEQ ID NO: 31085
  misc_feature 1..369: note = Description of Artificial Sequence: Synthetic polynucleotide
  source 1..369: mol_type = other DNA

SEQ ID NO: 31140 - protein, 123 aa, synthetic construct; identical to SEQ ID NO: 31086
  REGION 1..123: note = Description of Artificial Sequence: Synthetic polypeptide

SEQ ID NO: 31141 - DNA, 369 bp, synthetic construct
  misc_feature 1..369: note = Description of Artificial Sequence: Synthetic polynucleotide
  source 1..369: mol_type = other DNA
gaggtgcaactggtggagtcggggggaggcttggtacagcctggggggtccctgagactctcctgtgcagcctctggattcaccttcagtagctataatatgaactgggtccgccaggctccagggaagggcctggagtgggtttcatacattagtagtagtcgtaatatcatatattacgcagactctgtgaagggccgattcaccatctccagagaaaatgccaagaactcactgtctctgcaaatggacagcctgagagacgaggacacggctgtgtattactgtgcgcgagatggctcttatagcagtggctggtactggggttttgactactggggccagggcaccctggtcaccgtctcctca

SEQ ID NO: 31142 - protein, 123 aa, synthetic construct
  REGION 1..123: note = Description of Artificial Sequence: Synthetic polypeptide
EVQLVESGGGLVQPGGSLRLSCAASGFTFSSYNMNWVRQAPGKGLEWVSYISSSRNIIYYADSVKGRFTISRENAKNSLSLQMDSLRDEDTAVYYCARDGSYSSGWYWGFDYWGQGTLVTVSS

SEQ ID NO: 31143 - DNA, 369 bp, synthetic construct; identical to SEQ ID NO: 31085
  misc_feature 1..369: note = Description of Artificial Sequence: Synthetic polynucleotide
  source 1..369: mol_type = other DNA

SEQ ID NO: 31144 - protein, 123 aa, synthetic construct; identical to SEQ ID NO: 31086
  REGION 1..123: note = Description of Artificial Sequence: Synthetic polypeptide

SEQ ID NO: 31145 - DNA, 360 bp, synthetic construct
  misc_feature 1..360: note = Description of Artificial Sequence: Synthetic polynucleotide
  source 1..360: mol_type = other DNA
caggtgcagctggtggagtctgggggaggcgtggtccagcctgggaggtccctgagactctcctgtgcagcgtctggattcaccttcagtagcaatggcatgcactgggtccgccaggctccaggcaaggggctggagtgggtggcagttatatggtatgatggaagtaataaaaactatgcagactccgtgaagggccgattcaccatctccagagacaattccaagaacacgctgtatctgcaaatgaacagcctgagagccgaggacacggctgtgtattactgtgcgagagactacggtgtcgggtactacggtctggacgtctggggccaagggaccacggtcaccgtctcctca

SEQ ID NO: 31146 - protein, 120 aa, synthetic construct
  REGION 1..120: note = Description of Artificial Sequence: Synthetic polypeptide
QVQLVESGGGVVQPGRSLRLSCAASGFTFSSNGMHWVRQAPGKGLEWVAVIWYDGSNKNYADSVKGRFTISRDNSKNTLYLQMNSLRAEDTAVYYCARDYGVGYYGLDVWGQGTTVTVSS

SEQ ID NO: 31147 - DNA, 360 bp, synthetic construct; identical to SEQ ID NO: 31065
  misc_feature 1..360: note = Description of Artificial Sequence: Synthetic polynucleotide
  source 1..360: mol_type = other DNA

SEQ ID NO: 31148 - protein, 120 aa, synthetic construct; identical to SEQ ID NO: 31066
  REGION 1..120: note = Description of Artificial Sequence: Synthetic polypeptide

SEQ ID NO: 31149 - DNA, 369 bp, synthetic construct; identical to SEQ ID NO: 31085
  misc_feature 1..369: note = Description of Artificial Sequence: Synthetic polynucleotide
  source 1..369: mol_type = other DNA

SEQ ID NO: 31150 - protein, 123 aa, synthetic construct; identical to SEQ ID NO: 31086
  REGION 1..123: note = Description of Artificial Sequence: Synthetic polypeptide

SEQ ID NO: 31151 - DNA, 369 bp, synthetic construct; identical to SEQ ID NO: 31085
  misc_feature 1..369: note = Description of Artificial Sequence: Synthetic polynucleotide
  source 1..369: mol_type = other DNA

SEQ ID NO: 31152 - protein, 123 aa, synthetic construct; identical to SEQ ID NO: 31086
  REGION 1..123: note = Description of Artificial Sequence: Synthetic polypeptide

SEQ ID NO: 31153 - DNA, 369 bp, synthetic construct; identical to SEQ ID NO: 31085
  misc_feature 1..369: note = Description of Artificial Sequence: Synthetic polynucleotide
  source 1..369: mol_type = other DNA

SEQ ID NO: 31154 - protein, 123 aa, synthetic construct; identical to SEQ ID NO: 31086
  REGION 1..123: note = Description of Artificial Sequence: Synthetic polypeptide

SEQ ID NO: 31155 - DNA, 360 bp, synthetic construct; identical to SEQ ID NO: 31083
  misc_feature 1..360: note = Description of Artificial Sequence: Synthetic polynucleotide
  source 1..360: mol_type = other DNA

SEQ ID NO: 31156 - protein, 120 aa, synthetic construct; identical to SEQ ID NO: 31084
  REGION 1..120: note = Description of Artificial Sequence: Synthetic polypeptide

SEQ ID NO: 31157 - DNA, 378 bp, synthetic construct
  misc_feature 1..378: note = Description of Artificial Sequence: Synthetic polynucleotide
  source 1..378: mol_type = other DNA
caggtgcagctgcaggagtcgggcccaggactggtgaagccttcggagaccctgtccctcacctgcactgtctctggtggctccatcagtacttactactggagctggatccggcagcccccagggaagggactggagtggattgggtatatctattacagtgggaccaccaactacaacccctccctcaagagtcgagtcaccatatcagtagacacgtccaagaaccagttctccctgaagctgagctctgtgaccgctgcggacacggccgtgtattactgtgcgagagaccagcagtggctggtacgtgggagggacaactactactacggtatggacgtctggggccaagggaccacggtcaccgtctcctca

SEQ ID NO: 31158 - protein, 126 aa, synthetic construct
  REGION 1..126: note = Description of Artificial Sequence: Synthetic polypeptide
QVQLQESGPGLVKPSETLSLTCTVSGGSISTYYWSWIRQPPGKGLEWIGYIYYSGTTNYNPSLKSRVTISVDTSKNQFSLKLSSVTAADTAVYYCARDQQWLVRGRDNYYYGMDVWGQGTTVTVSS

SEQ ID NO: 31159 - DNA, 369 bp, synthetic construct; identical to SEQ ID NO: 31085
  misc_feature 1..369: note = Description of Artificial Sequence: Synthetic polynucleotide
  source 1..369: mol_type = other DNA

SEQ ID NO: 31160 - protein, 123 aa, synthetic construct; identical to SEQ ID NO: 31086
  REGION 1..123: note = Description of Artificial Sequence: Synthetic polypeptide

SEQ ID NO: 31161 - DNA, 351 bp, synthetic construct
  misc_feature 1..351: note = Description of Artificial Sequence: Synthetic polynucleotide
  source 1..351: mol_type = other DNA
caggtgcagctggtgcagtctggggctgaggtgaagaagcctggggcctcagtgaaggtctcctgcaagacttctggatacaccttcaccggctactatatgcactgggtgcgacaggcccctggacaagggcttgagtggatgggatggatccaccctaacagtggtggcacaaactatgcacagaaatttcagggcagggtcaccctgaccagggacacgtccatcagcacagcctacatggacctgagcaggctgagatctgacgacacggccgtgtattactgtgcgagagatgggaccagctcgtttgactactggggccagggaaccctggtcaccgtctcctca

SEQ ID NO: 31162 - protein, 117 aa, synthetic construct
  REGION 1..117: note = Description of Artificial Sequence: Synthetic polypeptide
QVQLVQSGAEVKKPGASVKVSCKTSGYTFTGYYMHWVRQAPGQGLEWMGWIHPNSGGTNYAQKFQGRVTLTRDTSISTAYMDLSRLRSDDTAVYYCARDGTSSFDYWGQGTLVTVSS

SEQ ID NO: 31163 - DNA, 360 bp, synthetic construct
  misc_feature 1..360: note = Description of Artificial Sequence: Synthetic polynucleotide
  source 1..360: mol_type = other DNA
caggtgcagctggtggagtctgggggaggcgtggtccagcctgggaggtccctgagactctcctgtgcagcgtctggattcaccttcagtagcaatggcatgcactgggtccgccaggctccaggcaaggggctggagtgggtggcagttatatggtacgatggaagtaatgaaaactatgcagactccgtgaagggccgattcaccatctccagagacaattccaagaacacgctgtatctgcaaatgaacagcctgagagccgaggacacggctgtgtattactgtgcgagagatcggacagtgggctacaacggtatggacgtctggggccaagggaccacggtcaccgtctcctca

SEQ ID NO: 31164 - protein, 120 aa, synthetic construct
  REGION 1..120: note = Description of Artificial Sequence: Synthetic polypeptide
QVQLVESGGGVVQPGRSLRLSCAASGFTFSSNGMHWVRQAPGKGLEWVAVIWYDGSNENYADSVKGRFTISRDNSKNTLYLQMNSLRAEDTAVYYCARDRTVGYNGMDVWGQGTTVTVSS

SEQ ID NO: 31165 - DNA, 351 bp, synthetic construct; identical to SEQ ID NO: 31161
  misc_feature 1..351: note = Description of Artificial Sequence: Synthetic polynucleotide
  source 1..351: mol_type = other DNA

SEQ ID NO: 31166 - protein, 117 aa, synthetic construct; identical to SEQ ID NO: 31162
  REGION 1..117: note = Description of Artificial Sequence: Synthetic polypeptide

SEQ ID NO: 31167 - DNA, 351 bp, synthetic construct; identical to SEQ ID NO: 31161
  misc_feature 1..351: note = Description of Artificial Sequence: Synthetic polynucleotide
  source 1..351: mol_type = other DNA

SEQ ID NO: 31168 - protein, 117 aa, synthetic construct; identical to SEQ ID NO: 31162
  REGION 1..117: note = Description of Artificial Sequence: Synthetic polypeptide

SEQ ID NO: 31169 - DNA, 351 bp, synthetic construct
  misc_feature 1..351: note = Description of Artificial Sequence: Synthetic polynucleotide
  source 1..351: mol_type = other DNA
caggttcagctggtgcagtctggagctgaggtgaagaagcctggggcctcagtgaaggtctcctgcaaggcttctggtttcacctttaccagctatggtatcaactgggtgcgacaggcccctggacaagggcttgagtggatgggatggatcagcgtttacaatggtaacacaaactatgcacagaagctccagggcagagtcaccatgaccacagacacatccacgagcacagcctacatggagctgaggagcctgagatctgacgacacggccgtgtattactgtgcgagagactactactacggttttgacgtctggggccaagggaccacggtcaccgtctcctca

SEQ ID NO: 31170 - protein, 117 aa, synthetic construct
  REGION 1..117: note = Description of Artificial Sequence: Synthetic polypeptide
QVQLVQSGAEVKKPGASVKVSCKASGFTFTSYGINWVRQAPGQGLEWMGWISVYNGNTNYAQKLQGRVTMTTDTSTSTAYMELRSLRSDDTAVYYCARDYYYGFDVWGQGTTVTVSS

SEQ ID NO: 31171 - DNA, 360 bp, synthetic construct
  misc_feature 1..360: note = Description of Artificial Sequence: Synthetic polynucleotide
  source 1..360: mol_type = other DNA
caggtgcagctggtggagtctgggggaggcgtggtccagcctgggaggtccctgagactctcctgtgcagcgtctggattcaccttcagtagctatggcatgcactgggtccgccaggctccaggcaaggggctggaatgggtggcagttatatggtatgatggaagtaataaaaactatgcagactccgtgaagggccgattcaccatctccagagacaattccaagaacacgctgtatctgcaaatgaacagcctgagagccgaggacacggctgtatattactgtgcgagagatcgggatgtcgggtacaacggtatggacgtctggggccaagggaccacggtcaccgtctcctca

SEQ ID NO: 31172 - protein, 120 aa, synthetic construct
  REGION 1..120: note = Description of Artificial Sequence: Synthetic polypeptide
QVQLVESGGGVVQPGRSLRLSCAASGFTFSSYGMHWVRQAPGKGLEWVAVIWYDGSNKNYADSVKGRFTISRDNSKNTLYLQMNSLRAEDTAVYYCARDRDVGYNGMDVWGQGTTVTVSS

SEQ ID NO: 31173 - DNA, 366 bp, synthetic construct
  misc_feature 1..366: note = Description of Artificial Sequence: Synthetic polynucleotide
  source 1..366: mol_type = other DNA
gaggtgcagctattggagtctgggggaggcttggtacagcctggggggtccctgagactctcctgtgcagcctctggcttcacctttagcaactttgccatgagttgggtccgccaggctccagggaagggactggagtgggtctcaagtattgttggtagtggtggtcgcacgtactacgcagactccgtgaagggccggttcaccatctccagagacaattccaagaacacgctgtatctgcaaatgaacagcctgagagccgaggacacggccgtatattattgtgcgaaagacccttatcgtgtagcagtggctggggcctttgactactggggccagggaaccctgatcaccgtctcctca

SEQ ID NO: 31174 - protein, 122 aa, synthetic construct
  REGION 1..122: note = Description of Artificial Sequence: Synthetic polypeptide
EVQLLESGGGLVQPGGSLRLSCAASGFTFSNFAMSWVRQAPGKGLEWVSSIVGSGGRTYYADSVKGRFTISRDNSKNTLYLQMNSLRAEDTAVYYCAKDPYRVAVAGAFDYWGQGTLITVSS

SEQ ID NO: 31175 - DNA, 345 bp, synthetic construct
  misc_feature 1..345: note = Description of Artificial Sequence: Synthetic polynucleotide
  source 1..345: mol_type = other DNA
caggtgcagctacagcagtggggcgcaggactgttgaagccttcggagaccctgtccctcacctgcgctgtctatggtgggtccttcagtggtcgctactggagctggatccgccagcccccagggaaggggctggagtggattggggaaatcaatcatagtggaagcgccaactacaacccgtccctcaagagtcgagtcaccatatcagtagacacgtccaagaaccagttctccctgaagctgagttctgtgaccgccgcggacacggctgtatattactgtgcgagagactacggcgcccttgatttctggggccaagggacaatggtcaccgtctcttca

SEQ ID NO: 31176 - protein, 115 aa, synthetic construct
  REGION 1..115: note = Description of Artificial Sequence: Synthetic polypeptide
QVQLQQWGAGLLKPSETLSLTCAVYGGSFSGRYWSWIRQPPGKGLEWIGEINHSGSANYNPSLKSRVTISVDTSKNQFSLKLSSVTAADTAVYYCARDYGALDFWGQGTMVTVSS

SEQ ID NO: 31177 - DNA, 351 bp, synthetic construct; identical to SEQ ID NO: 31161
  misc_feature 1..351: note = Description of Artificial Sequence: Synthetic polynucleotide
  source 1..351: mol_type = other DNA

SEQ ID NO: 31178 - protein, 117 aa, synthetic construct; identical to SEQ ID NO: 31162
  REGION 1..117: note = Description of Artificial Sequence: Synthetic polypeptide

SEQ ID NO: 31179 - DNA, 366 bp, synthetic construct; identical to SEQ ID NO: 31173
  misc_feature 1..366: note = Description of Artificial Sequence: Synthetic polynucleotide
  source 1..366: mol_type = other DNA

SEQ ID NO: 31180 - protein, 122 aa, synthetic construct; identical to SEQ ID NO: 31174
  REGION 1..122: note = Description of Artificial Sequence: Synthetic polypeptide

SEQ ID NO: 31181 - DNA, 360 bp, synthetic construct
  misc_feature 1..360: note = Description of Artificial Sequence: Synthetic polynucleotide
  source 1..360: mol_type = other DNA
caggtgcagctggtggagtctgggggaggcgtggtccagcctgggaggtccctgagactctcctgtgcagcgtctggattcaccttcagtagctatggcatgcactgggtccgccaggctccaggcaaggggctggagtgggtggcagttatatggtatgatggaagtaataaaaactatgcagactccgtgaagggccgattcaccatctccagagacaattccaagaacacgctgtatctgcaaatgaacagcctgagagccgaggacacggctgtgtattactgtgcgagagatcgggatgtcgggtacaacggtatggacgtctggggccaagggaccacggtcaccgtctcctca

SEQ ID NO: 31182 - protein, 120 aa, synthetic construct; identical to SEQ ID NO: 31172
  REGION 1..120: note = Description of Artificial Sequence: Synthetic polypeptide

SEQ ID NO: 31183 - DNA, 351 bp, synthetic construct; identical to SEQ ID NO: 31161
  misc_feature 1..351: note = Description of Artificial Sequence: Synthetic polynucleotide
  source 1..351: mol_type = other DNA

SEQ ID NO: 31184 - protein, 117 aa, synthetic construct; identical to SEQ ID NO: 31162
  REGION 1..117: note = Description of Artificial Sequence: Synthetic polypeptide

SEQ ID NO: 31185 - DNA, 351 bp, synthetic construct
  misc_feature 1..351: note = Description of Artificial Sequence: Synthetic polynucleotide
  source 1..351: mol_type = other DNA
caggttcagctggtgcagtctggagctgaggtgaagaagcctggggcctcagtgaaggtctcctgcaaggcttctggtttcacctttaccagctatggtatcaactgggtgcgacaggcccctggacaaggacttgagtggatgggatggatcagcgtttacagtggtaacacaaactatgcacagaagctccagggcagagtcaccatgaccacagatacatccacgagcacagcctacatggagctgaggagcctgagatctgacgacacggccgtgtattactgtgcgagagactactactacggtatggacgtctggggccaagggaccacggtcaccgtctcctca

SEQ ID NO: 31186 - protein, 117 aa, synthetic construct
  REGION 1..117: note = Description of Artificial Sequence: Synthetic polypeptide
QVQLVQSGAEVKKPGASVKVSCKASGFTFTSYGINWVRQAPGQGLEWMGWISVYSGNTNYAQKLQGRVTMTTDTSTSTAYMELRSLRSDDTAVYYCARDYYYGMDVWGQGTTVTVSS

SEQ ID NO: 31187 - DNA, 360 bp, synthetic construct
  misc_feature 1..360: note = Description of Artificial Sequence: Synthetic polynucleotide
  source 1..360: mol_type = other DNA
caggtgcagctggtggagtctgggggaggcgtggtccagcctgggaggtccctgagactctcctgtgcagcgtctggattcaccttcagtagctatggcatgcactgggtccgccaggctccaggcaaggggctggagtgggtggcagttatatggtatgatggaagtaataaaaactatgcagactccgtgaagggccgattcaccatctccagagaccattccaagaacacgctgtatctgcaaatgaacagcctgagagccgaggacacggctgtgtattactgtgcgagagatcgggatgtcgggtacaacggtatggacgtctggggccaagggaccacggtcaccgtctcctca

SEQ ID NO: 31188 - protein, 120 aa, synthetic construct
  REGION 1..120: note = Description of Artificial Sequence: Synthetic polypeptide
QVQLVESGGGVVQPGRSLRLSCAASGFTFSSYGMHWVRQAPGKGLEWVAVIWYDGSNKNYADSVKGRFTISRDHSKNTLYLQMNSLRAEDTAVYYCARDRDVGYNGMDVWGQGTTVTVSS

SEQ ID NO: 31189 - DNA, 369 bp, synthetic construct
  misc_feature 1..369: note = Description of Artificial Sequence: Synthetic polynucleotide
  source 1..369: mol_type = other DNA
gaggtgcaggtgttggagtctgggggaggcttggtacagcctggggggtccctgagactctcctgtgcagcctctggattcacctttagcagctatgccatgagctgggtccgccaggctccagggaaggggctggagtgggtctcagctattagtggcagaggcggcagcacatactacgcagacgccgtgaagggccggttcaccatctccagagacaattccaagaacacgctgtatctgcaaatgaacagcctgagagccgaggacacggccgtatattactgcgcgaaaggctcctacgatagtagtggttattaccactacttagaccactggggccagggaaccctggtcaccgtctcctca

SEQ ID NO: 31190 - protein, 123 aa, synthetic construct
  REGION 1..123: note = Description of Artificial Sequence: Synthetic polypeptide
EVQVLESGGGLVQPGGSLRLSCAASGFTFSSYAMSWVRQAPGKGLEWVSAISGRGGSTYYADAVKGRFTISRDNSKNTLYLQMNSLRAEDTAVYYCAKGSYDSSGYYHYLDHWGQGTLVTVSS

SEQ ID NO: 31191 - DNA, 363 bp, synthetic construct
  misc_feature 1..363: note = Description of Artificial Sequence: Synthetic polynucleotide
  source 1..363: mol_type = other DNA
gaggtgcaggtgttggagtctgggggaggcttggtacagcctggggggtccctgagactctcctgtgcagcctctggattcacctttagcagctatgccatgagctgggtccgccaggctccagggaaggggctggagtgggtctcagctattagtggtagtggtggtaacacatactacgcagactccgtgaagggccggttcaccatctccagagacaattccaagaacacgctgtatctgcacatgaacagcctgagagccgaggacacggccgtatattactgtgcgggagaggggggctactactattactacggtgtggacgtctggggccaagggaccacggtcaccgtctcctca

SEQ ID NO: 31192 - protein, 121 aa, synthetic construct
  REGION 1..121: note = Description of Artificial Sequence: Synthetic polypeptide
EVQVLESGGGLVQPGGSLRLSCAASGFTFSSYAMSWVRQAPGKGLEWVSAISGSGGNTYYADSVKGRFTISRDNSKNTLYLHMNSLRAEDTAVYYCAGEGGYYYYYGVDVWGQGTTVTVSS

SEQ ID NO: 31193 - DNA, 369 bp, synthetic construct
  misc_feature 1..369: note = Description of Artificial Sequence: Synthetic polynucleotide
  source 1..369: mol_type = other DNA
caggtgcagctggtggagtctgggggaggcgtggtccagcctgggaggtccctgagactctcctgtgcagcgtctggattcaccttcagtagctatatcatgcactgggtccgccaggctccaggcaaggggctggagtgggtggcagttatatggtatgatggaagtaataaatactatgcagactccgtgaagggccgattcaccatctccagagacaattccaagaacacgctgtatctgcaaatgaacagcctgagagccgaggacacggctgtgtattactgtgcgagagagaggtatagcagcaactggtacgactacggtatggacgtctggggccaagggaccacggtcaccgtctcctca

SEQ ID NO: 31194 - protein, 123 aa, synthetic construct
  REGION 1..123: note = Description of Artificial Sequence: Synthetic polypeptide
QVQLVESGGGVVQPGRSLRLSCAASGFTFSSYIMHWVRQAPGKGLEWVAVIWYDGSNKYYADSVKGRFTISRDNSKNTLYLQMNSLRAEDTAVYYCARERYSSNWYDYGMDVWGQGTTVTVSS

SEQ ID NO: 31195 - DNA, 369 bp, synthetic construct
  misc_feature 1..369: note = Description of Artificial Sequence: Synthetic polynucleotide
  source 1..369: mol_type = other DNA
caggtgcagctggtgcagtctggggctgaggtgaagaagcctggggcctcagtgaaggtctcctgcaaggcttctggatacaccttcaccggctactatatacactgggtgcgacaggcccctggacaagggcttgagtggatgggatggatcaacccttacagtggtgacacaaactatgcacagaagtttcagggcagagtcaccatgaccagggacacgtccatcagcacagcctacatggaactgagcaggctgagatttgacgacacggccgtgttttactgtgcgagagattggggtggctacagttcttactactacggtatggacgtctggggccaagggaccacggtcaccgtctcttca

SEQ ID NO: 31196 - protein, 123 aa, synthetic construct
  REGION 1..123: note = Description of Artificial Sequence: Synthetic polypeptide
QVQLVQSGAEVKKPGASVKVSCKASGYTFTGYYIHWVRQAPGQGLEWMGWINPYSGDTNYAQKFQGRVTMTRDTSISTAYMELSRLRFDDTAVFYCARDWGGYSSYYYGMDVWGQGTTVTVSS

SEQ ID NO: 31197 - DNA, 357 bp, synthetic construct
  misc_feature 1..357: note = Description of Artificial Sequence: Synthetic polynucleotide
  source 1..357: mol_type = other DNA
cagctgcagctgcaggagtcgggcccaggactggtgaagtcttcggagaccctgtccctcacctgcactgtctctggcggctccatcagcagaagtagttactactggggctggatccgccagcccccagggaagggcctggagtggattgggaatatctattatagtgggagcacctactacaacccgtccctcaagagtcgagtcaccatatccgtagacacgtccaagaaccagttctccctgaagctgagctctgtgaccgccgcagacacggctgtgtattactgtgcgagacagggtcgggactggggtgttgactacgggggccagggaaccctagtcaccgtctcctca

SEQ ID NO: 31198 - protein, 119 aa, synthetic construct
  REGION 1..119: note = Description of Artificial Sequence: Synthetic polypeptide
QLQLQESGPGLVKSSETLSLTCTVSGGSISRSSYYWGWIRQPPGKGLEWIGNIYYSGSTYYNPSLKSRVTISVDTSKNQFSLKLSSVTAADTAVYYCARQGRDWGVDYGGQGTLVTVSS

SEQ ID NO: 31199 - DNA, 369 bp, synthetic construct
  misc_feature 1..369: note = Description of Artificial Sequence: Synthetic polynucleotide
  source 1..369: mol_type = other DNA
caggtgcagctggtggagtctgggggaggcgtggtccagcctgggaggtccctgagactctcctgtgcagcgtctggattcagcttcagtagctatggcatgcactgggtccgccaggctccaggcaaggggctggagtgggtggcagttatatggtatgatggaagtaataaatactatgcagactccgtgaagggccgattcaccatctccagagacaattccaagaacacgctgtatctgcaaatgaacagcctgagagccgaggacacggctgtgtattactgtgcgagagagaggtatagcagcagctggtacgactacggtatggacgtctggggccaagggaccacggtcaccgtctcctca

SEQ ID NO: 31200 - protein, 123 aa, synthetic construct
  REGION 1..123: note = Description of Artificial Sequence: Synthetic polypeptide
QVQLVESGGGVVQPGRSLRLSCAASGFSFSSYGMHWVRQAPGKGLEWVAVIWYDGSNKYYADSVKGRFTISRDNSKNTLYLQMNSLRAEDTAVYYCARERYSSSWYDYGMDVWGQGTTVTVSS

SEQ ID NO: 31201 - DNA, 354 bp, synthetic construct
  misc_feature 1..354: note = Description of Artificial Sequence: Synthetic polynucleotide
  source 1..354: mol_type = other DNA
caggtgcagctggtgcagtctggggctgaggtgaagaagcctggggcctcagtgaaggtctcctgcaaggcttctggatacaccttcaccaattatgatatcaactgggtgcgacaggccactggacaagggcttgagtggatgggatggatgaaccctaacagtggtaacacaggctatgcacagaagttccagggcagagtcaccatgaccaggaacacctccataagcacagcctacatggagctgagcagcctgagatctgaggacacggccgtgtattactgtgcgagttccagtggctggaactggttcgacccctggggccagggaaccctggtcaccgtctcctca

SEQ ID NO: 31202 - protein, 118 aa, synthetic construct
  REGION 1..118: note = Description of Artificial Sequence: Synthetic polypeptide
QVQLVQSGAEVKKPGASVKVSCKASGYTFTNYDINWVRQATGQGLEWMGWMNPNSGNTGYAQKFQGRVTMTRNTSISTAYMELSSLRSEDTAVYYCASSSGWNWFDPWGQGTLVTVSS

SEQ ID NO: 31203 - DNA, 363 bp, synthetic construct
  misc_feature 1..363: note = Description of Artificial Sequence: Synthetic polynucleotide
  source 1..363: mol_type = other DNA
gaggtgcaggtgttggagtctgggggaggcttggtacagcctggggggtccctgagactctcctgtgcagcctctggatccacctttagcagcgatgccatgagctgggtccgccaggctccagggaaggggctggagtgggtctcagctattagtggtagtggtgataacacattctacgcagactccgtgaagggccggttcaccatctccagagacaattccaagaacacgctgtatctgcaaatgaacagcctgagagccgaggacacggccgtatattactgtgcgaaagtctatagtgcctacgattctcactggttcgacccctggggccagggaaccctggtcaccgtctcctca

SEQ ID NO: 31204 - protein, 121 aa, synthetic construct
  REGION 1..121: note = Description of Artificial Sequence: Synthetic polypeptide
EVQVLESGGGLVQPGGSLRLSCAASGSTFSSDAMSWVRQAPGKGLEWVSAISGSGDNTFYADSVKGRFTISRDNSKNTLYLQMNSLRAEDTAVYYCAKVYSAYDSHWFDPWGQGTLVTVSS

SEQ ID NO: 31205 - DNA, 369 bp, synthetic construct
  misc_feature 1..369: note = Description of Artificial Sequence: Synthetic polynucleotide
  source 1..369: mol_type = other DNA
caggtgcagctggtgcagtctggggctgaggtgaagaagcctggggcctcagtgaaggtctcctgcaaggcttctggatacaccttcaccggctactatatacactgggtgcgacaggcccctggacaagggcttgagtggatgggatggatcaacccttacagtggtgacacaaactatgcacagaagtttcagggcagggtcaccatgaccagggacacgtccatcaccacagcctacatggaactgagcaggctgagatttgacgacacggccgtgttttactgtgcgagagattggggtggctacagttcttactactacggtatggacgtctggggccaagggaccacggtcaccgtctcttca

SEQ ID NO: 31206 - protein, 123 aa, synthetic construct
  REGION 1..123: note = Description of Artificial Sequence: Synthetic polypeptide
QVQLVQSGAEVKKPGASVKVSCKASGYTFTGYYIHWVRQAPGQGLEWMGWINPYSGDTNYAQKFQGRVTMTRDTSITTAYMELSRLRFDDTAVFYCARDWGGYSSYYYGMDVWGQGTTVTVSS

SEQ ID NO: 31207 - DNA, 354 bp, synthetic construct
  misc_feature 1..354: note = Description of Artificial Sequence: Synthetic polynucleotide
  source 1..354: mol_type = other DNA
caggtgcagctggtgcagtctggggctgaggtgaagaagcctggggcctcagtgaaggtctcctgcaaggcttctggatacaccttcaccaattatgatatcaactgggtgcgacaggccactggacaagggcttgagtggatgggatggttgtaccctaacagtggtaacacaggctatgcacagaagttccagggcagagtcaccatgaccaggaacacctccataagcacagcctacatggagctgagcagcctgagatctgaggacacggccgtgtattactgtgcttatagcagtggctggtactactttgactactggggccagggaaccctggtcatcgtctcctca

SEQ ID NO: 31208 - protein, 118 aa, synthetic construct
  REGION 1..118: note = Description of Artificial Sequence: Synthetic polypeptide
QVQLVQSGAEVKKPGASVKVSCKASGYTFTNYDINWVRQATGQGLEWMGWLYPNSGNTGYAQKFQGRVTMTRNTSISTAYMELSSLRSEDTAVYYCAYSSGWYYFDYWGQGTLVIVSS

SEQ ID NO: 31209 - DNA, 354 bp, synthetic construct
  misc_feature 1..354: note = Description of Artificial Sequence: Synthetic polynucleotide
  source 1..354: mol_type = other DNA
caggtgcagctggtgcagtctggggctgaggtgaagaagcctggggcctcagtgaaggtctcctgcaaggcttctggatccaccttcaccaattatgatatcaactgggtgcgacaggccactggacaagggcttgagtggatgggatggatgcaccctaacagtggtaacacaggctatgcacagaagttccagggcagagtcaccatgaccaggaacacctccataagcacagcctacatggagctgagcagcctgagatctgaggacacggccgtgtattactgtgcctatagcagtggctggtacaagtttgactactggggccagggaaccctggtcaccgtctcctca

SEQ ID NO: 31210 - protein, 118 aa, synthetic construct
  REGION 1..118: note = Description of Artificial Sequence: Synthetic polypeptide
QVQLVQSGAEVKKPGASVKVSCKASGSTFTNYDINWVRQATGQGLEWMGWMHPNSGNTGYAQKFQGRVTMTRNTSISTAYMELSSLRSEDTAVYYCAYSSGWYKFDYWGQGTLVTVSS

SEQ ID NO: 31211 - DNA, 351 bp, synthetic construct
  misc_feature 1..351: note = Description of Artificial Sequence: Synthetic polynucleotide
  source 1..351: mol_type = other DNA
caggtgcagctggtggagtctgggggaggcctggtccagcctggaaagtccctgagactctcctgtgcagcgtctggattcaccttcagtagctatggcatgcactgggtccgccaggctccaggcaaggggctggagtgggtggcagttatatggtatgagggaagtaataaatactatgtagactccgtgaggggccgattcaccatctccagagacaattccaagagtacgctgtatctgcaaatgaacagcctgcgagccgaggacacggctgtgtattactgtgtgagagagctaggcttccagtctgactactggggccagggaaccccggtcaccgtctcctca

SEQ ID NO: 31212 - protein, 117 aa, synthetic construct
  REGION 1..117: note = Description of Artificial Sequence: Synthetic polypeptide
QVQLVESGGGLVQPGKSLRLSCAASGFTFSSYGMHWVRQAPGKGLEWVAVIWYEGSNKYYVDSVRGRFTISRDNSKSTLYLQMNSLRAEDTAVYYCVRELGFQSDYWGQGTPVTVSS

SEQ ID NO: 31213 - DNA, 369 bp, synthetic construct
  misc_feature 1..369: note = Description of Artificial Sequence: Synthetic polynucleotide
  source 1..369: mol_type = other DNA
caggtgcagctggtgcagtctggggctgaggtgaagaagcctggggcctcagtgaaggtctcctgcaaggcttctggatacaccttcaccggctactatatacactgggtgcgacaggcccctggacaagggcttgagtggatgggatggatcaacccttacagtggtgacacaaactatgcacagaagtttcagggcagggtcaccatgaccagggacacgtccatcagcacagcctacatggaactgaggaggctgagatttgacgacacggccgtgttttactgtgcgagagattggggtggctacagttcttactacttcggtatggacgtctggggccaagggaccacggtcaccgtctcttca

SEQ ID NO: 31214 - protein, 123 aa, synthetic construct
  REGION 1..123: note = Description of Artificial Sequence: Synthetic polypeptide
QVQLVQSGAEVKKPGASVKVSCKASGYTFTGYYIHWVRQAPGQGLEWMGWINPYSGDTNYAQKFQGRVTMTRDTSISTAYMELRRLRFDDTAVFYCARDWGGYSSYYFGMDVWGQGTTVTVSS

SEQ ID NO: 31215 - DNA, 354 bp, synthetic construct
  misc_feature 1..354: note = Description of Artificial Sequence: Synthetic polynucleotide
  source 1..354: mol_type = other DNA
caggtgcagctggtgcagtctggggctgaggtgaagaagcctggggcctcagtgaaggtctcctgcaaggcttctggatacaccttcaccaattatgatatcaactgggtgcgacaggccactggacaagggcttgagtggatgggatggatgaaccctaacagtggtaacacaggctatgcacagaagttccagggcagagtcaccatgaccaggaacacctccataagcacagcctacatggagctgagcagcctgagatctgaggacacggccgtgtattactgtgcctatagcagtggctggtacaagtttgactactggggccagggaaccctggtcaccgtctcctca

SEQ ID NO: 31216 - protein, 118 aa, synthetic construct
  REGION 1..118: note = Description of Artificial Sequence: Synthetic polypeptide
QVQLVQSGAEVKKPGASVKVSCKASGYTFTNYDINWVRQATGQGLEWMGWMNPNSGNTGYAQKFQGRVTMTRNTSISTAYMELSSLRSEDTAVYYCAYSSGWYKFDYWGQGTLVTVSS

SEQ ID NO: 31217 - DNA, 369 bp, synthetic construct
  misc_feature 1..369: note = Description of Artificial Sequence: Synthetic polynucleotide
  source 1..369: mol_type = other DNA
caggtgcagctggtgcagtctggggctgaggtgaagaagcctggggcctcagtgaaggtctcctgcaaggcttctggatacaccttcaccggctactatatacactgggtgcgacagacccctggacaagggcttgagtggatgggatggatcaacccttacagtggtgacacaaactatgcacagaagtttcagggcagggtcaccatgaccagggacacgtccatcagcacagcctacatggaactgcgcaggctgagatttgacgacacggccgtcttttactgtgcgagagattggggtggctacagttcttactactacggtatggacgtctggggccaagggaccacggtcaccgtctcttca

SEQ ID NO: 31218 - protein, 123 aa, synthetic construct
  REGION 1..123: note = Description of Artificial Sequence: Synthetic polypeptide
QVQLVQSGAEVKKPGASVKVSCKASGYTFTGYYIHWVRQTPGQGLEWMGWINPYSGDTNYAQKFQGRVTMTRDTSISTAYMELRRLRFDDTAVFYCARDWGGYSSYYYGMDVWGQGTTVTVSS

SEQ ID NO: 31219 - DNA, 369 bp, synthetic construct
  misc_feature 1..369: note = Description of Artificial Sequence: Synthetic polynucleotide
  source 1..369: mol_type = other DNA
caggtgcagctggtggagtctgggggaggcgtggtccagcctgggaggtccctgagactctcctgtgcagcgtctggattcaccttcagtgactatgtcatccactgggtccgccaggctccaggcaaggggctggagtgggtggcagttatatggtatgatggaagtaataaatactatgcagactccgtgaagggccgattcaccatctccagagacaattccaagaacacgctgtatctgcaaatgaacagcctgagagccgaggacacggctgtgtattactgtgcgagagagaggtatagcagtggctggtacgactacggtatggacgtctggggccaagggaccacggtcaccgtctcctca

SEQ ID NO: 31220 - protein, 123 aa, synthetic construct
  REGION 1..123: note = Description of Artificial Sequence: Synthetic polypeptide
QVQLVESGGGVVQPGRSLRLSCAASGFTFSDYVIHWVRQAPGKGLEWVAVIWYDGSNKYYADSVKGRFTISRDNSKNTLYLQMNSLRAEDTAVYYCARERYSSGWYDYGMDVWGQGTTVTVSS

SEQ ID NO: 31221 - DNA, 372 bp, synthetic construct
  misc_feature 1..372: note = Description of Artificial Sequence: Synthetic polynucleotide
  source 1..372: mol_type = other DNA
caggtgcaactggtgcagtctggggctgaggtgaagaagcctggggcctcagtgaaggtttcctgcaaggcatctggatacaccttcaccagctactatatgcactgggtgcgacaggcccctggacaagggcttgagtggatgggaataatcaaccctagtggtggtagcacaagctacgcacagaagttccagggcagagtcaccatgaccagggacacgtccacgagcacagtctacatggagctgagcagcctgagatctgcggacacggccgtgtattactgtgcgagggatttagcagctcgttcttactactactacttcggtatggacgtctggggccaaggggccacggtcaccgtctcctca

SEQ ID NO: 31222 - protein, 124 aa, synthetic construct
  REGION 1..124: note = Description of Artificial Sequence: Synthetic polypeptide
QVQLVQSGAEVKKPGASVKVSCKASGYTFTSYYMHWVRQAPGQGLEWMGIINPSGGSTSYAQKFQGRVTMTRDTSTSTVYMELSSLRSADTAVYYCARDLAARSYYYYFGMDVWGQGATVTVSS

SEQ ID NO: 31223 - DNA, 354 bp, synthetic construct
  misc_feature 1..354: note = Description of Artificial Sequence: Synthetic polynucleotide
  source 1..354: mol_type = other DNA
caggtgcagctggtgcagtctggggctgaggtgaagaagcctggggcctcagtgaaggtctcctgcaaggcttctggatacaccttcaccaattatgatatcaactgggtgcgacaggccactggacaagggcttgagtggatgggatggatgcaccctaacagtggtagcacaggctatgcacagaagttccagggcagactcaccatgaccaggaacacctccataagcacagtctacatggaactgaacagcctgagatctgaggacacggccgtgtattattgtgcgagtagcagtggctggtactggttcgacccctggggccagggaaccctggtcaccgtctcctca

SEQ ID NO: 31224 - protein, 118 aa, synthetic construct
  REGION 1..118: note = Description of Artificial Sequence: Synthetic polypeptide
QVQLVQSGAEVKKPGASVKVSCKASGYTFTNYDINWVRQATGQGLEWMGWMHPNSGSTGYAQKFQGRLTMTRNTSISTVYMELNSLRSEDTAVYYCASSSGWYWFDPWGQGTLVTVSS

SEQ ID NO: 31225 - DNA, 369 bp, synthetic construct
  misc_feature 1..369: note = Description of Artificial Sequence: Synthetic polynucleotide
  source 1..369: mol_type = other DNA
caggtgcagctggtgcagtctggggctgaggtgaagaagcctggggcctcagtgaaggtctcctgcaaggcttctggatacaccttcaccggctactatatacactgggtgcgacaggcccctggacaagggcttgagtggatgggatggatcaacccttacagtggtgacacaaactatgcacagaagtttcagggcagggtcaccatgaccagggacacgtccatcagcacagcctacatggaactgcgcaggctgagatttgacgacacggccgtcttttactgtgcgagagattggggtggctacagttcttactactacggtatggacgtctggggccaagggaccacggtcaccgtctcttca

SEQ ID NO: 31226 - protein, 123 aa, synthetic construct
  REGION 1..123: note = Description of Artificial Sequence: Synthetic polypeptide
QVQLVQSGAEVKKPGASVKVSCKASGYTFTGYYIHWVRQAPGQGLEWMGWINPYSGDTNYAQKFQGRVTMTRDTSISTAYMELRRLRFDDTAVFYCARDWGGYSSYYYGMDVWGQGTTVTVSS

SEQ ID NO: 31227 - DNA, 354 bp, synthetic construct
  misc_feature 1..354: note = Description of Artificial Sequence: Synthetic polynucleotide
  source 1..354: mol_type = other DNA
caggtgcagctggtgcagtctggggctgaggtgaagaagcctagggcctcagtgaaggtctcctgcaaggcttctggacacaccttcaccaattatgatatcaactgggtgcgacaggccactggacaagggcttgagtggatgggatggatgcatcctaacagtggtaacacaggctttgcacagaagttccagggcagagtcaccatgaccaggaacacctccataagcacagcctacatggagctgagcagcctgagatctgaggacacggccgtgtattactgtgcatatagcagtggctggtaccgctttgactactggggccagggaaccctggtcaccgtctcctca

SEQ ID NO: 31228 - protein, 118 aa, synthetic construct
  REGION 1..118: note = Description of Artificial Sequence: Synthetic polypeptide
QVQLVQSGAEVKKPRASVKVSCKASGHTFTNYDINWVRQATGQGLEWMGWMHPNSGNTGFAQKFQGRVTMTRNTSISTAYMELSSLRSEDTAVYYCAYSSGWYRFDYWGQGTLVTVSS

SEQ ID NO: 31229 - DNA, 351 bp, synthetic construct
  misc_feature 1..351: note = Description of Artificial Sequence: Synthetic polynucleotide
  source 1..351: mol_type = other DNA
caggtgcggctggtggagtctgggggaggcgtggtccagcctgggaggtccctgagactctcctgtgcagcgtctggattcaccttcagtgactatggcatgcactgggtccgccaggctccaggcaaggggctggagtgggtggcagttatatggtatgatgaaaataataaatactatgcagactccgtgaagggccgattcaccatctccagagacaattccaagaacacgctgtatctgcaaatgaacagcctgagagccgaggacacggctgtgtattactgtgcgagagaagtgggattcactgaggactactggggccagggaaccctggtcaccgtctcctca

SEQ ID NO: 31230 - protein, 117 aa, synthetic construct
  REGION 1..117: note = Description of Artificial Sequence: Synthetic polypeptide
QVRLVESGGGVVQPGRSLRLSCAASGFTFSDYGMHWVRQAPGKGLEWVAVIWYDENNKYYADSVKGRFTISRDNSKNTLYLQMNSLRAEDTAVYYCAREVGFTEDYWGQGTLVTVSS

SEQ ID NO: 31231 - DNA, 351 bp, synthetic construct
  misc_feature 1..351: note = Description of Artificial Sequence: Synthetic polynucleotide
  source 1..351: mol_type = other DNA
caggtgcagctggtggagtctgggggaggcgtggtccagcctgggaggtccctgagactctcctgtgcagcgtctggattcaccttcagtaactatggcatgcactgggtccgccaggctccaggcaaggggctggagtgggtggcagttatatggtatgatgaaaataataaatactatgcagactccgtgaagggccgattcaccatctccagagacaattcccagaacacgctgtatctgcaaatgaccagcctgagagccgaggacacggctgtgtattactgtgcgagagaagtgggattcactgaggactactggggccagggaaccctggtcaccgtctcctca

SEQ ID NO: 31232 - protein, 117 aa, synthetic construct
  REGION 1..117: note = Description of Artificial Sequence: Synthetic polypeptide
QVQLVESGGGVVQPGRSLRLSCAASGFTFSNYGMHWVRQAPGKGLEWVAVIWYDENNKYYADSVKGRFTISRDNSQNTLYLQMTSLRAEDTAVYYCAREVGFTEDYWGQGTLVTVSS

SEQ ID NO: 31233 - DNA, 366 bp, synthetic construct
  misc_feature 1..366: note = Description of Artificial Sequence: Synthetic polynucleotide
  source 1..366: mol_type = other DNA
caggtgcagctgcaggagtcgggcccaggactggtgaagccttcacagaccctgtccctcacctgcactgtctctggtaactccatcagcagtggtcattactactggagctggatccgccagcacccagggaagggccttgagtggattgggttcatctattacactgggagcacctactacaacccgtccctcaagagtcgagttaccatatcagtagacacgtctaagaaccagttctccctgaagctgagctctgtgactgccgcggacacggccgtgtattactgtgcgagagaggccggtgactacggctactacggtatggacgtctggggccaagggaccacggtcaccgtctcctca

SEQ ID NO: 31234 - protein, 122 aa, synthetic construct
  REGION 1..122: note = Description of Artificial Sequence: Synthetic polypeptide
QVQLQESGPGLVKPSQTLSLTCTVSGNSISSGHYYWSWIRQHPGKGLEWIGFIYYTGSTYYNPSLKSRVTISVDTSKNQFSLKLSSVTAADTAVYYCAREAGDYGYYGMDVWGQGTTVTVSS

SEQ ID NO: 31235 - DNA, 351 bp, synthetic construct
  misc_feature 1..351: note = Description of Artificial Sequence: Synthetic polynucleotide
  source 1..351: mol_type = other DNA
caggtgcagctggtggagtctgggggaggcgtggtccagcctgggaggtccctgagactctcctgtgcagcgtctggattcaccttcagtagctatggcatgcactgggtccgccaggctccaggcaaggggctggagtgggtggcagttatatggtatgatgaaaataataaatactatgtagactccgtgaagggccgattcaccatctccagagacaattccaagaacacgctgtatctgcaaatgaacagcctgagagccgaggacacggctgtgtattactgtgcgagagaagtgggatttactgaggactactggggccagggaaccctggtcaccgtctcctca

SEQ ID NO: 31236 - protein, 117 aa, synthetic construct
  REGION 1..117: note = Description of Artificial Sequence: Synthetic polypeptide
QVQLVESGGGVVQPGRSLRLSCAASGFTFSSYGMHWVRQAPGKGLEWVAVIWYDENNKYYVDSVKGRFTISRDNSKNTLYLQMNSLRAEDTAVYYCAREVGFTEDYWGQGTLVTVSS

SEQ ID NO: 31237 - DNA, 354 bp, synthetic construct
  misc_feature 1..354: note = Description of Artificial Sequence: Synthetic polynucleotide
  source 1..354: mol_type = other DNA
caggtgcagctggtgcagtctgggactgaggtgaggaagcctggggcctcagtgaaggtctcctgcaaggcttctggatacaccttcaccaattatgatatcaactgggtacgacaggccactggacaaaggcttgagtggatgggatggatgcaccctaacagtggtaacacaggctatgcacagaagttccggggcagagtcaccatgaccaggaacacctccataaacacagcctacatggagctgaacagcctgagatctgaggacacggccgtatattattgtgcatatagcagtggctggaccctttttgactactggggccagggaaccctggtcaccgtctcctca

SEQ ID NO: 31238 - protein, 118 aa, synthetic construct
  REGION 1..118: note = Description of Artificial Sequence: Synthetic polypeptide
QVQLVQSGTEVRKPGASVKVSCKASGYTFTNYDINWVRQATGQRLEWMGWMHPNSGNTGYAQKFRGRVTMTRNTSINTAYMELNSLRSEDTAVYYCAYSSGWTLFDYWGQGTLVTVSS

SEQ ID NO: 31239 - DNA, 354 bp, synthetic construct
  misc_feature 1..354: note = Description of Artificial Sequence: Synthetic polynucleotide
  source 1..354: mol_type = other DNA
caggtgcagctggtgcagtctggggctgaggtgaagaagcctggggcctcagtgaaggtctcctgcaaggcttctggatacaccttcaccaattatgatatcaactgggtgcgacaggccactggacaagggcttgagtggatgggatggatgcaccctaacagtggtaacacaggctatgcacagaagttccagggcagagtcaccatgaccaggaacacctccataaacacagcctacatggagctgagcagcctgagatctgaggacacggccgtgtattactgtgcgtatagcagtggctggtaccgctttgactactggggccagggaaccctggtcaccgtctcctca

SEQ ID NO: 31240 - protein, 118 aa, synthetic construct
  REGION 1..118: note = Description of Artificial Sequence: Synthetic polypeptide
QVQLVQSGAEVKKPGASVKVSCKASGYTFTNYDINWVRQATGQGLEWMGWMHPNSGNTGYAQKFQGRVTMTRNTSINTAYMELSSLRSEDTAVYYCAYSSGWYRFDYWGQGTLVTVSS

SEQ ID NO: 31241 - DNA, 354 bp, synthetic construct
  misc_feature 1..354: note = Description of Artificial Sequence: Synthetic polynucleotide
  source 1..354: mol_type = other DNA
caggtgcagctggtgcagtctggggctgaggtgaagaagcctggggcctcagtgaaggtctcctgcaaggcttctggatacaccttcacccattatgatatcaactgggtgcgacaggccactggacaagggcttgagtggatgggatggatgcacccaaacagtggtaacacaggctatgcacagaagttccagggcagagtcaccatggccaggaacacctccataagcacagcctacatggagctgagcagcctgagatctgaggacacggccgtgtattactgtgcctatagcagtggctggtacaagtttgactactggggccagggaaccctggtcaccgtctcctca

SEQ ID NO: 31242 - protein, 118 aa, synthetic construct
  REGION 1..118: note = Description of Artificial Sequence: Synthetic polypeptide
QVQLVQSGAEVKKPGASVKVSCKASGYTFTHYDINWVRQATGQGLEWMGWMHPNSGNTGYAQKFQGRVTMARNTSISTAYMELSSLRSEDTAVYYCAYSSGWYKFDYWGQGTLVTVSS

SEQ ID NO: 31243 - DNA, 354 bp, synthetic construct
  misc_feature 1..354: note = Description of Artificial Sequence: Synthetic polynucleotide
  source 1..354: mol_type = other DNA
caggtgcagctggtgcagtctggggctgaggtgaagaagcctggggcctcagtgaaggtctcctgcaaggcttctggatacaccttcaccaattatgatatcaactgggtgcgacaggccactggacaagggcttgagtggatgggatggatgcaccctaacagtggtaacacaggctatgcacagaagttccagggcagagtcaccatgaccaggaacacctccataagcacagcctacatggagctgagcagcctgagatctgaggacacggccgtgtattactgtgcctatagcagtggctggtacaagtttgactactggggccagggaaccctggtcaccgtctcctca

SEQ ID NO: 31244 - protein, 118 aa, synthetic construct
  REGION 1..118: note = Description of Artificial Sequence: Synthetic polypeptide
QVQLVQSGAEVKKPGASVKVSCKASGYTFTNYDINWVRQATGQGLEWMGWMHPNSGNTGYAQKFQGRVTMTRNTSISTAYMELSSLRSEDTAVYYCAYSSGWYKFDYWGQGTLVTVSS

SEQ ID NO: 31245 - DNA, 363 bp, synthetic construct
  misc_feature 1..363: note = Description of Artificial Sequence: Synthetic polynucleotide
  source 1..363: mol_type = other DNA
caggtgcagctggtggagtctgggggaggcgtggtccagcctgggaggtccctgagactctcctgtgcagcgtctggattcaccttcagtacctatggcatgcactgggtccgccaggctccaggcaaggggctggagtgggtggcaattatatggtatgatggaggttataaatactatgcagactccgtgaagggccgattcaccatctccagagacaattccaagaacacgctgtttctgcaaatgaacagcctgagagccgaggacacggctgtgtattactgtgcgagagatcactacgatttttggagtggttatcttacccactggggccagggaaccctggtcaccgtctcctca

SEQ ID NO: 31246 - protein, 121 aa, synthetic construct
  REGION 1..121: note = Description of Artificial Sequence: Synthetic polypeptide
QVQLVESGGGVVQPGRSLRLSCAASGFTFSTYGMHWVRQAPGKGLEWVAIIWYDGGYKYYADSVKGRFTISRDNSKNTLFLQMNSLRAEDTAVYYCARDHYDFWSGYLTHWGQGTLVTVSS

SEQ ID NO: 31247 - DNA, 363 bp, synthetic construct
  misc_feature 1..363: note = Description of Artificial Sequence: Synthetic polynucleotide
  source 1..363: mol_type = other DNA
caggtgcagctggtggagtctgggggaggcgtggtccagcctgggaggtccctgagactctcctgtgcagcgtctggattcaccttcagtaactatggcatgcactgggtccgccaggctccaggcaaggggctggagtgggtggcaattatatggtatgatggaactaataaatactatacagactccgtgaagggccgattcaccatctccagagacaattccaagaacacgctgtatctgcaaatgaacagcctgagagccgaggacacggctgtgtattactgtgcgagagagggtcacgatttttggagtggctttttttgttactggggccagggaaccctggtcaccgtctcctca

SEQ ID NO: 31248 - protein, 121 aa, synthetic construct
  REGION 1..121: note = Description of Artificial Sequence: Synthetic polypeptide
QVQLVESGGGVVQPGRSLRLSCAASGFTFSNYGMHWVRQAPGKGLEWVAIIWYDGTNKYYTDSVKGRFTISRDNSKNTLYLQMNSLRAEDTAVYYCAREGHDFWSGFFCYWGQGTLVTVSS

SEQ ID NO: 31249 - DNA, 369 bp, synthetic construct
  misc_feature 1..369: note = Description of Artificial Sequence: Synthetic polynucleotide
  source 1..369: mol_type = other DNA
caggtgcagctggtggagtctgggggaggcgtggtccagcctgggaggtccctgagactctcctgtgcagcgtctggattcaccttcagtgactatggcatgcactgggtccgccaggctccaggcaaggggctggagtgggtggcagttatatggtatgatggaagtaataaatactatgcagactccgtgaagggccgattcaccatctccagagacaattccaagaacacgctgtatctgcaaacgaacagcctgagagccgaggacacggctgtgtattactgtgcgagagagaggtatagcagcagctggtacgactacggtatggacgtctggggccaagggaccacggtcaccgtctcctca

SEQ ID NO: 31250 - protein, 123 aa, synthetic construct
  REGION 1..123: note = Description of Artificial Sequence: Synthetic polypeptide
QVQLVESGGGVVQPGRSLRLSCAASGFTFSDYGMHWVRQAPGKGLEWVAVIWYDGSNKYYADSVKGRFTISRDNSKNTLYLQTNSLRAEDTAVYYCARERYSSSWYDYGMDVWGQGTTVTVSS

SEQ ID NO: 31251 - DNA, 354 bp, synthetic construct; identical to SEQ ID NO: 31243
  misc_feature 1..354: note = Description of Artificial Sequence: Synthetic polynucleotide
  source 1..354: mol_type = other DNA

SEQ ID NO: 31252 - protein, 118 aa, synthetic construct; identical to SEQ ID NO: 31244
  REGION 1..118: note = Description of Artificial Sequence: Synthetic polypeptide

SEQ ID NO: 31253 - DNA, 354 bp, synthetic construct; identical to SEQ ID NO: 31239
  misc_feature 1..354: note = Description of Artificial Sequence: Synthetic polynucleotide
  source 1..354: mol_type = other DNA

SEQ ID NO: 31254 - protein, 118 aa, synthetic construct; identical to SEQ ID NO: 31240
  REGION 1..118: note = Description of Artificial Sequence: Synthetic polypeptide

SEQ ID NO: 31255 - DNA, 363 bp, synthetic construct
  misc_feature 1..363: note = Description of Artificial Sequence: Synthetic polynucleotide
  source 1..363: mol_type = other DNA
caggtgcagctggtggagtctgggggaggcgtggtccagcctgggaggtccctgagactctcctgtgcagcgtctggattcaccttcagtacctatggcatgcactgggtccgccaggctccaggcaaggggctggaatgggtggcaattatatggtatgatggaagtaataaatactatgcagactccgtgaagggccgattcaccatctccagagacaatttcaagaacacgctgtatctgcaaatgcacagcctgagagccgacgacacggctgtgtattactgtgcgagagagaattacgatttttggagtggttattatggctactggggccagggaaccctggtcaccgtctcctca

SEQ ID NO: 31256 - protein, 121 aa, synthetic construct
  REGION 1..121: note = Description of Artificial Sequence: Synthetic polypeptide
QVQLVESGGGVVQPGRSLRLSCAASGFTFSTYGMHWVRQAPGKGLEWVAIIWYDGSNKYYADSVKGRFTISRDNFKNTLYLQMHSLRADDTAVYYCARENYDFWSGYYGYWGQGTLVTVSS

SEQ ID NO: 31257 - DNA, 369 bp, synthetic construct
  misc_feature 1..369: note = Description of Artificial Sequence: Synthetic polynucleotide
  source 1..369: mol_type = other DNA
caggtgcagctggtggagtctgggggaggcgtggtccagcctgggaggtccctgagactctcctgtgcagcgtctggattcaccttcagtagctatggcatgcactgggtccgccaggctccaggcaaggggctggagtgggtggcaattatatggtatgatggaagtaataaatactatgcagactccgtgaagggccgattcaccatctccagagacaattccaagaacacgctgtatctgcaaatgaacagcctgagagccgaggacacggctgtgtattactgtgcgagagagaggtataacagcggctggtacgactacggtttggacgtctggggccaagggaccacggtcaccgtctcctca

SEQ ID NO: 31258 - protein, 123 aa, synthetic construct
  REGION 1..123: note = Description of Artificial Sequence: Synthetic polypeptide
QVQLVESGGGVVQPGRSLRLSCAASGFTFSSYGMHWVRQAPGKGLEWVAIIWYDGSNKYYADSVKGRFTISRDNSKNTLYLQMNSLRAEDTAVYYCARERYNSGWYDYGLDVWGQGTTVTVSS

SEQ ID NO: 31259 - DNA, 369 bp, synthetic construct
  misc_feature 1..369: note = Description of Artificial Sequence: Synthetic polynucleotide
  source 1..369: mol_type = other DNA
caggtgcagctggtgcagtctggggctgaggtgaagaagcctggggcctcagtgaaggtctcctgcaaggcttctggatacaccttcaccggctactatatacactgggtgcgacaggcccctggacaagggcttgagtggatgggatggatcaacccttacagtggtgacacaaagtatgcacagaagtttcagggcagggtcaccatgaccagggacacgtccatcagcacagcctacatggaactgagcaggctgagatttgacgacacggccgtgttttactgtgcgagagattggggtggctacagttcttactactacggtatggacgtctggggccaagggaccacggtcaccgtctcttca

SEQ ID NO: 31260 - protein, 123 aa, synthetic construct
  REGION 1..123: note = Description of Artificial Sequence: Synthetic polypeptide
QVQLVQSGAEVKKPGASVKVSCKASGYTFTGYYIHWVRQAPGQGLEWMGWINPYSGDTKYAQKFQGRVTMTRDTSISTAYMELSRLRFDDTAVFYCARDWGGYSSYYYGMDVWGQGTTVTVSS

SEQ ID NO: 31261 - DNA, 351 bp, synthetic construct
  misc_feature 1..351: note = Description of Artificial Sequence: Synthetic polynucleotide
  source 1..351: mol_type = other DNA
caggtgcagctggtggagtctgggggaggcgtggtccagcctgggaggtccctgagactctcctgtgcagcgtctggattcaccttcagtaactatggcatgcactgggtccgccaggctccaggcaaggggctggagtgggtggcagttatatggtatgaggaaagtaataaatactatacagactccgtgaagggccgattcaccatctccagagacaattccaagaacacgctgtttctgcaaatgaacagcctgagagccgaggacacggctgtgtattactgtgcgagagaagtgggattcactgaggactactggggccagggaaccctggtcaccgtctcctca

SEQ ID NO: 31262 - protein, 117 aa, synthetic construct
  REGION 1..117: note = Description of Artificial Sequence: Synthetic polypeptide
QVQLVESGGGVVQPGRSLRLSCAASGFTFSNYGMHWVRQAPGKGLEWVAVIWYEESNKYYTDSVKGRFTISRDNSKNTLFLQMNSLRAEDTAVYYCAREVGFTEDYWGQGTLVTVSS

SEQ ID NO: 31263 - DNA, 369 bp, synthetic construct
  misc_feature 1..369: note = Description of Artificial Sequence: Synthetic polynucleotide
  source 1..369: mol_type = other DNA
caggtgcagctggtgcagtctggggctgaggtgaagaagcctggggcctcagtgaaggtctcctgcaaggcttctggatacaccttcaccggctactatatacactgggtgcgacaggcccctggacaagggcttgagtggatgggatggatcaacccttacagtggtgacacaaagtatgcacagaagtttcagggcagggtcaccatgaccagggccacgtccatcagcacagcctacatggaactgagcaggctgagatttgacgacacggccgtgttttactgtgcgagagattggggtggctacagttcttactactacggtatggacgtctggggccaagggaccacggtcaccgtctcttca

SEQ ID NO: 31264 - protein, 123 aa, synthetic construct
  REGION 1..123: note = Description of Artificial Sequence: Synthetic polypeptide
QVQLVQSGAEVKKPGASVKVSCKASGYTFTGYYIHWVRQAPGQGLEWMGWINPYSGDTKYAQKFQGRVTMTRATSISTAYMELSRLRFDDTAVFYCARDWGGYSSYYYGMDVWGQGTTVTVSS

SEQ ID NO: 31265 - DNA, 369 bp, synthetic construct
  misc_feature 1..369: note = Description of Artificial Sequence: Synthetic polynucleotide
  source 1..369: mol_type = other DNA
caggtgcagctggtgcagtctggggctgaggtgaagaagcctggggcctcagtgaaggtctcctgcaaggcttctggatacaccttcaccggctactatatacactgggtgcgacaggcccctggacaagggcttgagtggatgggatggatcaacccttacagtggtgacacaaactctgcacagaagtttcagggccgggtcaccatgaccagggacacgtccatcagcacagcctacatggaactgagcaggctgagatttgacgacacggccgtgttttactgtgcgagagattggggtggctacagttcttactactacggtatggacgtctggggccaagggaccacggtcaccgtctcttca

SEQ ID NO: 31266 - protein, 123 aa, synthetic construct
  REGION 1..123: note = Description of Artificial Sequence: Synthetic polypeptide
QVQLVQSGAEVKKPGASVKVSCKASGYTFTGYYIHWVRQAPGQGLEWMGWINPYSGDTNSAQKFQGRVTMTRDTSISTAYMELSRLRFDDTAVFYCARDWGGYSSYYYGMDVWGQGTTVTVSS

SEQ ID NO: 31267 - DNA, 369 bp, synthetic construct
  misc_feature 1..369: note = Description of Artificial Sequence: Synthetic polynucleotide
  source 1..369: mol_type = other DNA
caggtgcagctggtgcagtctgggggtgaggtgaagaagctgagggcctcagtgaaggtctcctgcaaggcttctggatacaccttcaccggctattatatacactgggtgcgacaggcccctggacaagggcttgagtggatgggatggatcaacccatacagtggtgacacaaactatgcacagaagtttcagggcagggtcaccatgaccagggacacgtccgtcagcacagcctacatggaactgagcaggttgagattggacgacacggccgtgttttactgtgcgagagattggggtggctacagttcttactactacggtatggacgtctggggccaagggaccccggtcaccgtctcttca

SEQ ID NO: 31268 - protein, 123 aa, synthetic construct
  REGION 1..123: note = Description of Artificial Sequence: Synthetic polypeptide
QVQLVQSGGEVKKLRASVKVSCKASGYTFTGYYIHWVRQAPGQGLEWMGWINPYSGDTNYAQKFQGRVTMTRDTSVSTAYMELSRLRLDDTAVFYCARDWGGYSSYYYGMDVWGQGTPVTVSS

SEQ ID NO: 31269 - DNA, 354 bp, synthetic construct
  misc_feature 1..354: note = Description of Artificial Sequence: Synthetic polynucleotide
  source 1..354: mol_type = other DNA
caggtgcagctggtgcagtctggggctgaggtgaagaagcctggggcctcagtgaaggtctcctgcaggtcttctggatacaccttcaccaattatgatatcaactgggtgcgacaggccactggacaagggcttgagtggatgggatggatgcaccctaacagtggtaacacaggctatgcacagaagttccagggcagagtcaccatgaccaggaacacctccataagcacagcctacatggagctgagcagcctgagatctgaggacacggccgtgtattactgtgcctatagcagtggctggtactactttgactactggggccagggaaccctggtcaccgtctcctca

SEQ ID NO: 31270 - protein, 118 aa, synthetic construct
  REGION 1..118: note = Description of Artificial Sequence: Synthetic polypeptide
QVQLVQSGAEVKKPGASVKVSCRSSGYTFTNYDINWVRQATGQGLEWMGWMHPNSGNTGYAQKFQGRVTMTRNTSISTAYMELSSLRSEDTAVYYCAYSSGWYYFDYWGQGTLVTVSS

SEQ ID NO: 31271 - DNA, 369 bp, synthetic construct
  misc_feature 1..369: note = Description of Artificial Sequence: Synthetic polynucleotide
  source 1..369: mol_type = other DNA
caggtgcagctggtgcagtctggggctgaggtgaagaagcctggggcctcagtgaaggtctcctgcaaggcttctggatacaccttcaccggctactatatacactgggtgcgacaggcccctggacaagggcttgagtggatgggatggatcaacccttacagtggtgacacaaactatgcacagaagtttcagggcagggtcaccatgaccagggacacgtccatcagcacagcctacatggaactgagcaggctgagatttgacgacacggccgtgttttactgtgcgagagattggggtggctacagttcttactactacggtatggacgtctggggccaagggaccacggtcaccgtctcttca

SEQ ID NO: 31272 - protein, 123 aa, synthetic construct; identical to SEQ ID NO: 31196
  REGION 1..123: note = Description of Artificial Sequence: Synthetic polypeptide

SEQ ID NO: 31273 - DNA, 369 bp, synthetic construct
  misc_feature 1..369: note = Description of Artificial Sequence: Synthetic polynucleotide
  source 1..369: mol_type = other DNA
caggtgcagttggtggagtctgggggaggcgtggtccagcctgggaggtccctgagactctcctgtgcagcgtctggattcaccttcagtaactgtggcatgcactgggtccgccaggctccaggcaaggggctggagtgggtgacagttatatggtatgatggaagtaataaatactatgcagactccgtgaagggccgattcaccatctccagagacaattccaagaacacgctgtatctgcaaatgaacagcctgagagccgaggacacggctgtgtattactgtgcgagagagctgtatagcagcagctggtacgactacggtttggacgtctggggccaagggaccacggtcaccgtctcctca

SEQ ID NO: 31274 - protein, 123 aa, synthetic construct
  REGION 1..123: note = Description of Artificial Sequence: Synthetic polypeptide
QVQLVESGGGVVQPGRSLRLSCAASGFTFSNCGMHWVRQAPGKGLEWVTVIWYDGSNKYYADSVKGRFTISRDNSKNTLYLQMNSLRAEDTAVYYCARELYSSSWYDYGLDVWGQGTTVTVSS

SEQ ID NO: 31275 - DNA, 354 bp, synthetic construct
  misc_feature 1..354: note = Description of Artificial Sequence: Synthetic polynucleotide
  source 1..354: mol_type = other DNA
caggtgcagctggtgcagtctggggctgaggtgaagaagcctggggcctcagtgaaggtctcctgcaaggcttctggatacaccttcaccaattatgatatcaactgggtgcgacaggccactggacaagggcttgagtggatgggatggatgcaccctaacagtggtaacacaggctatgcacagaagttccagggcagagtcaccatgaccaggaacacctccataagcacagcctacatggagctgagcagcctgagatctgaggacacggccgtgtattactgtgcttatagcagtggctggtactactttgactactggggccagggaaccctggtcaccgtctcctca

SEQ ID NO: 31276 - protein, 118 aa, synthetic construct; identical to SEQ ID NO: 30230
  REGION 1..118: note = Description of Artificial Sequence: Synthetic polypeptide

SEQ ID NO: 31277 - DNA, 369 bp, synthetic construct
  misc_feature 1..369: note = Description of Artificial Sequence: Synthetic polynucleotide
  source 1..369: mol_type = other DNA
caggtgcagctggtgcagtctggggctgaggtgaagaagcctggggcctcagtgaaggtctcctgcaaggcttctggatacaccttcaccggctactatatacactgggtgcgacaggcccctggacaagggcttgagtggatgggatggatcaacccttacagtggtgacacaaactatgcacagaagtttcagggcagggtcaccatgaccagggacacgtccatcagcacagcctacatggaactgaggaggctgagatttgacgacacggccgtgttttactgtgcgagagattggggtggctacagttcttactactacggtatggacgtctggggccaagggaccacggtcaccgtctcttca

SEQ ID NO: 31278 - protein, 123 aa, synthetic construct; identical to SEQ ID NO: 31226
  REGION 1..123: note = Description of Artificial Sequence: Synthetic polypeptide

SEQ ID NO: 31279 - DNA, 369 bp, synthetic construct
  misc_feature 1..369: note = Description of Artificial Sequence: Synthetic polynucleotide
  source 1..369: mol_type = other DNA
caggtgcagctggtgcagtctggggctgaggtgaagaagcctggggcctcagtgaaggtctcctgcaaggcttctggatacaccttcaccggctactatacacactgggtgcgacaggcccctggacaagggcttgagtggatgggatggatcaacccttacagtggtggcacaaactatgcacagaagtttcagggcagggtcaccatgaccagggacacgtccatcagcacagcctacatggaactgagcaggctgagatttgacgacacggccgtgtattactgtgcgagagattggggtggctacagttcttactactacggtatggacgtctggggccaagggaccacggtcaccgtctcttca

SEQ ID NO: 31280 - protein, 123 aa, synthetic construct
  REGION 1..123: note = Description of Artificial Sequence: Synthetic polypeptide
QVQLVQSGAEVKKPGASVKVSCKASGYTFTGYYTHWVRQAPGQGLEWMGWINPYSGGTNYAQKFQGRVTMTRDTSISTAYMELSRLRFDDTAVYYCARDWGGYSSYYYGMDVWGQGTTVTVSS

SEQ ID NO: 31281 - DNA, 369 bp, synthetic construct
  misc_feature 1..369: note = Description of Artificial Sequence: Synthetic polynucleotide
  source 1..369: mol_type = other DNA
caggtgcacctggtgcagtctggggctgaggtgaagaagcctggggcctcagtgaaggtctcctgcaaggcttctggatacaccttcaccggctactatatacactgggtgcgacaggcccctggacaagggcttgagtggatgggatggatcaacccttacagtggtgacacaaagtatgcacagaagtttcagggcagggtcaccatgaccagggacacgtccatcagcacagcctacatggaactgagcaggctgagatttgacgacacggccgtgttttactgtgcgagagattggggtggctacagttcttactactacggtatggacgtctggggccaagggaccacggtcaccgtctcttca

SEQ ID NO: 31282 - protein, 123 aa, synthetic construct
  REGION 1..123: note = Description of Artificial Sequence: Synthetic polypeptide
QVHLVQSGAEVKKPGASVKVSCKASGYTFTGYYIHWVRQAPGQGLEWMGWINPYSGDTKYAQKFQGRVTMTRDTSISTAYMELSRLRFDDTAVFYCARDWGGYSSYYYGMDVWGQGTTVTVSS

SEQ ID NO: 31283 - DNA, 351 bp, synthetic construct
  misc_feature 1..351: note = Description of Artificial Sequence: Synthetic polynucleotide
  source 1..351: mol_type = other DNA
caggtgcagctggtggagtctgggggaggcgtggtccagcctgggaggtccctgagactctcctgtgcagcgtctggattcaccttcagtagctatggcatgcactgggtccgccaggctccaggcaaggggctggagtgggtggcagttatatggtatgttggaagtaatcaatactatgcagactccgtgaagggccgattcaccatctccagagacaattccaagaacacgctgtatctgcaaatgagcagcctgagagccgaggacacggctgtgtattactgtgcgagagaagtgggattcactgaggactactggggccagggaaccctggtcaccgtctcctcc

SEQ ID NO: 31284 - protein, 117 aa, synthetic construct
  REGION 1..117: note = Description of Artificial Sequence: Synthetic polypeptide
QVQLVESGGGVVQPGRSLRLSCAASGFTFSSYGMHWVRQAPGKGLEWVAVIWYVGSNQYYADSVKGRFTISRDNSKNTLYLQMSSLRAEDTAVYYCAREVGFTEDYWGQGTLVTVSS

SEQ ID NO: 31285 - DNA, 348 bp, synthetic construct
  misc_feature 1..348: note = Description of Artificial Sequence: Synthetic polynucleotide
  source 1..348: mol_type = other DNA
gaggggcagctattggagtctgggggaggcttggtacagcctggggggtcactgagactctcctgtacagcctctggattcacctttagcacttttgccatgacctgggtccgccaggctccagggagggggctggagtgggtctcagttattagtggtagaggtggtagctcattctacgcagactccgtgaagggccggttcaccatctccagagacaataccaagaacacgctgtatctgcaaatgaacagcctgagagccgaggacacggccgtatattactgtgcgaaagatcaactatggtttgactactggggccagggaaccctggtcaccgtctcctca

SEQ ID NO: 31286 - protein, 116 aa, synthetic construct
  REGION 1..116: note = Description of Artificial Sequence: Synthetic polypeptide
EGQLLESGGGLVQPGGSLRLSCTASGFTFSTFAMTWVRQAPGRGLEWVSVISGRGGSSFYADSVKGRFTISRDNTKNTLYLQMNSLRAEDTAVYYCAKDQLWFDYWGQGTLVTVSS

SEQ ID NO: 31287 - DNA, 351 bp, synthetic construct
  misc_feature 1..351: note = Description of Artificial Sequence: Synthetic polynucleotide
  source 1..351: mol_type = other DNA
caggtgcagctggtggagtctgggggaggcgtggtccagcctgggaggtccctgagactctcctgtgcagcgtctggattcaccttcagtaactatggcatgcactgggtccgccaggctccaggcaaggggctggactgggtggcagttatatggtatgaagaaagtaataaatactatgcagactccgtgaagggccgattcaccatctccagagacaattccaagaacacgctgtatctgcaaatgaacagcctgagagccgaggacacggctatgtattactgtgcgagagaagtgggattcactgaggactactggggccagggaaccctggtcaccgtctcctca

SEQ ID NO: 31288 - protein, 117 aa, synthetic construct
  REGION 1..117: note = Description of Artificial Sequence: Synthetic polypeptide
QVQLVESGGGVVQPGRSLRLSCAASGFTFSNYGMHWVRQAPGKGLDWVAVIWYEESNKYYADSVKGRFTISRDNSKNTLYLQMNSLRAEDTAMYYCAREVGFTEDYWGQGTLVTVSS

SEQ ID NO: 31289 - DNA, 354 bp, synthetic construct; identical to SEQ ID NO: 31243
  misc_feature 1..354: note = Description of Artificial Sequence: Synthetic polynucleotide
  source 1..354: mol_type = other DNA

SEQ ID NO: 31290 - protein, 118 aa, synthetic construct; identical to SEQ ID NO: 31244
  REGION 1..118: note = Description of Artificial Sequence: Synthetic polypeptide

SEQ ID NO: 31291 - DNA, 354 bp, synthetic construct
  misc_feature 1..354: note = Description of Artificial Sequence: Synthetic polynucleotide
  source 1..354: mol_type = other DNA
caggtgcagctggtgcagtctggggctgaggtgaagaagcctagggcctcagtgaaggtctcctgcaaggcttctggacacaccttcaccaattatgatatcaactgggtgcgacaggccactggacaagggcttgagtggatgggatggatgcatcctaacagtggtaacacaggctatgcacagaagttccagggcagagtcaccatgaccaggaacacctccataagcaccgcctacatggagctgagcagcctgagatctgaggacacggccgtgtattactgtgcatatagcagtggctggtaccgctttgactactggggccagggaaccctggtcaccgtctcctca

SEQ ID NO: 31292 - protein, 118 aa, synthetic construct
  REGION 1..118: note = Description of Artificial Sequence: Synthetic polypeptide
QVQLVQSGAEVKKPRASVKVSCKASGHTFTNYDINWVRQATGQGLEWMGWMHPNSGNTGYAQKFQGRVTMTRNTSISTAYMELSSLRSEDTAVYYCAYSSGWYRFDYWGQGTLVTVSS

SEQ ID NO: 31293 - DNA, 369 bp, synthetic construct
  misc_feature 1..369: note = Description of Artificial Sequence: Synthetic polynucleotide
  source 1..369: mol_type = other DNA
caggtgcagctggtgcagtctggggctgaggtgaagaagcctggggcctcagtgaaggtctcctgcaaggcttctggatacaccttcaccggctactatatacactgggtgcgacaggcccctggacaagggcttgagtggatgggatggatcaacccttacagtggtgacacaaactatgcacagaagtttcagggcagggtcaccatgaccagggacacgtccgtcagcacagcctacatggaactgagcaggctgagatttgacgacacggccgtgttttactgtgcgagagattggggtggctacagttcttactactacggtatggacgtctggggccaagggaccacggtcaccgtctcttca

SEQ ID NO: 31294 - protein, 123 aa, synthetic construct
  REGION 1..123: note = Description of Artificial Sequence: Synthetic polypeptide
QVQLVQSGAEVKKPGASVKVSCKASGYTFTGYYIHWVRQAPGQGLEWMGWINPYSGDTNYAQKFQGRVTMTRDTSVSTAYMELSRLRFDDTAVFYCARDWGGYSSYYYGMDVWGQGTTVTVSS

SEQ ID NO: 31295 - DNA, 354 bp, synthetic construct
  misc_feature 1..354: note = Description of Artificial Sequence: Synthetic polynucleotide
  source 1..354: mol_type = other DNA
caggtgcagctggtgcagtctggggctgaggtgaagaagcctggggcctcagtgaaggtctcctgcagggcttctggatacaccttcaccaattatgatatcaactgggtgcgacaggccactggacgagggcttgagtggatgggatggatgtaccctaacagtggtaacacaggctatgcacagaagttccagggcagagtcaccatgaccaggaacacctccataagcacagcctacatggagctgagcagcctgagatctgaggacacggccgtgtattactgtgcgcttagcagtggctggtactggttcgacccctggggccagggaaccctggtcaccgtctcctca

SEQ ID NO: 31296 - protein, 118 aa, synthetic construct
  REGION 1..118: note = Description of Artificial Sequence: Synthetic polypeptide
QVQLVQSGAEVKKPGASVKVSCRASGYTFTNYDINWVRQATGRGLEWMGWMYPNSGNTGYAQKFQGRVTMTRNTSISTAYMELSSLRSEDTAVYYCALSSGWYWFDPWGQGTLVTVSS

SEQ ID NO: 31297 - DNA, 354 bp, synthetic construct
  misc_feature 1..354: note = Description of Artificial Sequence: Synthetic polynucleotide
  source 1..354: mol_type = other DNA
caggtgcagctggtgcagtctggggctgaggtgaagaagcctggggcctcagtgaaggtctcctgcaaggcttctggatacaccttcaccaattatgatatcaactgggtgcgacaggccactggacaagggcttgagtggatgggatggatgcaccctaacagtggtaacacaggctatgcacagaagttccagggccgagtcaccatgaccaggaacacctccataagcacagcctacatggaactgagcagcctgagatctgaggacacggccgtgtattactgtgcgtatagcagtggctggtactactttgactactggggccagggaaccctggtcaccgtctcctca

SEQ ID NO: 31298 - protein, 118 aa, synthetic construct; identical to SEQ ID NO: 30230
  REGION 1..118: note = Description of Artificial Sequence: Synthetic polypeptide

SEQ ID NO: 31299 - DNA, 339 bp, synthetic construct
  misc_feature 1..339: note = Description of Artificial Sequence: Synthetic polynucleotide
  source 1..339: mol_type = other DNA
gaggtgcagctggtggagtctgggggaggcctggtcaagcctggggggtccctgagactctcctgtgcagtctctggattcaccttcagtacctatagcatgaactgggtccgccaggctccagggaaggggctggagtgggtctcatccattagtagtagtattaattacatgtactacgcagactcagtgaagggccgattcaccatctccagagacaacgccaagaactcactgtatctgcaaatgaacagcctgagagccgaggactcggctgtgtattactgtgcgagattaggggtctactggggccagggaaccctggtcaccgtctcctca

SEQ ID NO: 31300 - protein, 113 aa, synthetic construct
  REGION 1..113: note = Description of Artificial Sequence: Synthetic polypeptide
EVQLVESGGGLVKPGGSLRLSCAVSGFTFSTYSMNWVRQAPGKGLEWVSSISSSINYMYYADSVKGRFTISRDNAKNSLYLQMNSLRAEDSAVYYCARLGVYWGQGTLVTVSS

SEQ ID NO: 31301 - DNA, 351 bp, synthetic construct
  misc_feature 1..351: note = Description of Artificial Sequence: Synthetic polynucleotide
  source 1..351: mol_type = other DNA
caggtgcagctggtggagtctgggggaggcgtggtccagcctgggaagtccctgagactctcctgtgcagcgtctggattcaccttcagtaactatggcatgcactgggtccgccaggctccaggcaaggggctggagtgggtggcagttatatggtatattggaagtaatcaatactatgcggactccgtgaagggccgattcaccatctccagagacaattccaagaacacgctgtatctgcaaatgagcagcctgagagccgaggacacggctgtgtattactgtgcgagagaagtgggattcactgaggactactggggccagggaaccctggtcaccgtctcctcc

SEQ ID NO: 31302 - protein, 117 aa, synthetic construct
  REGION 1..117: note = Description of Artificial Sequence: Synthetic polypeptide
QVQLVESGGGVVQPGKSLRLSCAASGFTFSNYGMHWVRQAPGKGLEWVAVIWYIGSNQYYADSVKGRFTISRDNSKNTLYLQMSSLRAEDTAVYYCAREVGFTEDYWGQGTLVTVSS

SEQ ID NO: 31303 - DNA, 363 bp, synthetic construct
  misc_feature 1..363: note = Description of Artificial Sequence: Synthetic polynucleotide
  source 1..363: mol_type = other DNA
gaggtgcaactgttggagtctgggggaggcttggtacagcctggggggtccctgagactctcctgtgcagcttctggattcacctttagcagctatgccatgagctgggtccgccaggctccagggaaggggctggagtgggtctcagttattagtggtggtggtagtagcacatactacgcagactccgtgaagggccggttcaccatctccagagacaattccaagaacacgctgtatctgcaaatgaacagcctgagagccgaggacacggccgtatattactgtgcgaaatggcgaggtaaccccactgactacggtatggacgtctggggccaagggaccacggtcaccgtctcctca

SEQ ID NO: 31304 - protein, 121 aa, synthetic construct
  REGION 1..121: note = Description of Artificial Sequence: Synthetic polypeptide
EVQLLESGGGLVQPGGSLRLSCAASGFTFSSYAMSWVRQAPGKGLEWVSVISGGGSSTYYADSVKGRFTISRDNSKNTLYLQMNSLRAEDTAVYYCAKWRGNPTDYGMDVWGQGTTVTVSS

SEQ ID NO: 31305 - DNA, 363 bp, synthetic construct
  misc_feature 1..363: note = Description of Artificial Sequence: Synthetic polynucleotide
  source 1..363: mol_type = other DNA
gaggtgcaactgttggagtctgggggaggcttggtacagccgggggggtccctgagactctcctgtgcagcctctggaatcacctttagcagctatgccatgagctgggtccgccaggctccagggaaggggctggagtgggtctcagttattagtggtggtggtagtagcacatactacgcagactccgtgaagggccggttcaccatctccagagacaattccaagaacacgctgtatctgcaaatgaacagcctgagagccgaggacacggccgtatattactgtgcgaaatggcgaggtaaccccactgactacggtatggacgtctggggccaagggaccacggtcaccgtctcctca

SEQ ID NO: 31306 - protein, 121 aa, synthetic construct
  REGION 1..121: note = Description of Artificial Sequence: Synthetic polypeptide
EVQLLESGGGLVQPGGSLRLSCAASGITFSSYAMSWVRQAPGKGLEWVSVISGGGSSTYYADSVKGRFTISRDNSKNTLYLQMNSLRAEDTAVYYCAKWRGNPTDYGMDVWGQGTTVTVSS

SEQ ID NO: 31307 - DNA, 363 bp, synthetic construct
  misc_feature 1..363: note = Description of Artificial Sequence: Synthetic polynucleotide
  source 1..363: mol_type = other DNA
gaggtgcaactgttggagtctgggggaggcctggtacagcctggggggtccctgagactctcctgtgcagcctctggattcacctttagcagctatgccatgagctgggtccgccaggctccagggaaggggctggagtgggtctcagttattagtggtggtggtagtagcacatactacgcagactccgtgaagggccggttcaccatctccagagacaattccaagaacacgctgcatctgcaaatgaacagcctgagagccgaggacacggccgtatattactgtgcgaaatggcgaggtaaccccactgactacggtatggacgtctggggccaagggaccacggtcaccgtctcctca

SEQ ID NO: 31308 - protein, 121 aa, synthetic construct
  REGION 1..121: note = Description of Artificial Sequence: Synthetic polypeptide
EVQLLESGGGLVQPGGSLRLSCAASGFTFSSYAMSWVRQAPGKGLEWVSVISGGGSSTYYADSVKGRFTISRDNSKNTLHLQMNSLRAEDTAVYYCAKWRGNPTDYGMDVWGQGTTVTVSS

SEQ ID NO: 31309 - DNA, 375 bp, synthetic construct
  misc_feature 1..375: note = Description of Artificial Sequence: Synthetic polynucleotide
  source 1..375: mol_type = other DNA
gaggtgcagctggtggagtctgggggaggcttggtacagcctggggggtccctgagactctcctgtgcagcctctggattcaccttcagtaactataacatgaactgggtccgccaggctccagggaaggggctggagtgggtttcatacattagtagaagtagtaataccaaatactatgtagactctgtgaagggccgattcaccatctccagagacaatgccaagaactcattgtatctgcaaatgaacagcctgagagacgaggacacggctgtgtattactgtgcgagagataggagtgggagctacgggtacttctactactacggtttggacgtctggggccaagggaccacggtcaccgtctcctca

SEQ ID NO: 31310 - protein, 125 aa, synthetic construct
  REGION 1..125: note = Description of Artificial Sequence: Synthetic polypeptide
EVQLVESGGGLVQPGGSLRLSCAASGFTFSNYNMNWVRQAPGKGLEWVSYISRSSNTKYYVDSVKGRFTISRDNAKNSLYLQMNSLRDEDTAVYYCARDRSGSYGYFYYYGLDVWGQGTTVTVSS

SEQ ID NO: 31311 - DNA, 387 bp, synthetic construct
  misc_feature 1..387: note = Description of Artificial Sequence: Synthetic polynucleotide
  source 1..387: mol_type = other DNA
caggtgcagctggtgcagtctggggctgaggtgaagaagcctggggcctcagtgaaggtctcctgcaaggcttctggatacaccttcaccagttatgatatcaactgggtgcgacaggccactggacaagggcttgagtggatgggatggatgaaccctaatagtggtaacacaggctatgcacagaagttccagggcagagtcaccatgaccaggaacacctccataagcacagcctatatggagctgagaagcctgagatctgaggacacggccgtgtattactgtgcgagagcggatattgtattagtaccagctgctatcccttataattactacttcgctatggacgtctggggccaagggaccacggtcaccgtctcctca

SEQ ID NO: 31312 - protein, 129 aa, synthetic construct
  REGION 1..129: note = Description of Artificial Sequence: Synthetic polypeptide
QVQLVQSGAEVKKPGASVKVSCKASGYTFTSYDINWVRQATGQGLEWMGWMNPNSGNTGYAQKFQGRVTMTRNTSISTAYMELRSLRSEDTAVYYCARADIVLVPAAIPYNYYFAMDVWGQGTTVTVSS

SEQ ID NO: 31313 - DNA, 363 bp, synthetic construct
  misc_feature 1..363: note = Description of Artificial Sequence: Synthetic polynucleotide
  source 1..363: mol_type = other DNA
gaggtgcaactgttggagtctgggggaggcttggtacagcctggggggtccctgagactctcctgtgcagcctctggattcacctttagcagctatgccatgagctgggtccgccaggctccagggaaggggctggagtgggtctcagttattagtggtggtggtagtagtacatactacgcagactccgtgaagggccggttcaccctctccagagacaattccaagaacacgctgtatctgcaaatgaacagcctgagagccgaggacacggccgttttttactgtgcgaaatggcgaggtaaccccactgactacggtatggacgtctggggccaagggaccacggtcaccgtctcctca

SEQ ID NO: 31314 - protein, 121 aa, synthetic construct
  REGION 1..121: note = Description of Artificial Sequence: Synthetic polypeptide
EVQLLESGGGLVQPGGSLRLSCAASGFTFSSYAMSWVRQAPGKGLEWVSVISGGGSSTYYADSVKGRFTLSRDNSKNTLYLQMNSLRAEDTAVFYCAKWRGNPTDYGMDVWGQGTTVTVSS

SEQ ID NO: 31315 - DNA, 384 bp, synthetic construct
  misc_feature 1..384: note = Description of Artificial Sequence: Synthetic polynucleotide
  source 1..384: mol_type = other DNA
caggtgcagctggtgcagtctggggctgaggtgaagaagcctggggcctcagtgaaggtctcctgcaaggcttctggatacaccttcaccgactactatttgcactgggtgcgacaggcccctggacaagggcttgagtggatgggatggatcaaccctaacagtggtgacacaaactatgcacagaagtttcagggcagggtcaccatgaccagggacacgtccatcagcacagcctacatggagctgagcaggctgagatctgacgacacggccgtgtattactgtgcgagagatcgggactctggttcggggagttacccctactactactactacggtatggacgtctggggccaagggaccacggtcaccgtctcctca

SEQ ID NO: 31316 - protein, 128 aa, synthetic construct
  REGION 1..128: note = Description of Artificial Sequence: Synthetic polypeptide
QVQLVQSGAEVKKPGASVKVSCKASGYTFTDYYLHWVRQAPGQGLEWMGWINPNSGDTNYAQKFQGRVTMTRDTSISTAYMELSRLRSDDTAVYYCARDRDSGSGSYPYYYYYGMDVWGQGTTVTVSS

SEQ ID NO: 31317 - DNA, 378 bp, synthetic construct
  misc_feature 1..378: note = Description of Artificial Sequence: Synthetic polynucleotide
  source 1..378: mol_type = other DNA
caggtgcagttggtggagtctgggggaggcgtggtccagcctgggaggtccctgagactctcctgtgcagcgtctggattcaccttcagtagctatggcatgcactgggtccgccaggctccaggcaaggggctggagtgggtggcagttatatggtatgatggaagtaataaatactatgcagactccgtgaagggccgattcaccatctccagagacaattccaagaacacgctgtatctgcaaatgaacagcctgagagccgaggacacggctgtgtattactgtgcgagagatcgtgactacggtgaccccccctactactactactacggtatggacgtctggggccaagggaccacggtcaccgtctcctca

SEQ ID NO: 31318 - protein, 126 aa, synthetic construct
  REGION 1..126: note = Description of Artificial Sequence: Synthetic polypeptide
QVQLVESGGGVVQPGRSLRLSCAASGFTFSSYGMHWVRQAPGKGLEWVAVIWYDGSNKYYADSVKGRFTISRDNSKNTLYLQMNSLRAEDTAVYYCARDRDYGDPPYYYYYGMDVWGQGTTVTVSS

SEQ ID NO: 31319 - DNA, 378 bp, synthetic construct
  misc_feature 1..378: note = Description of Artificial Sequence: Synthetic polynucleotide
  source 1..378: mol_type = other DNA
caggtgcagctggtggagtctgggggaggcgtggtccagcctgggaggtccctgagactctcctgtgcagcgtctggattcaccttcagtagctatggcatgcactgggtccgccaggctccaggcaaggggctggagtgggtggcagatatatggtttgatggcagtaataaatactatgtagactccgtgaaggaccgattcaccatctccagagacaattccaagaacacgctgtatctgcaaatgaacagcctgagagccgaggacacggctgtttattactgtgcgagagatcgggtggagggttcggggactccctactactactacggtatggacgtctggggccaagggaccacggtcaccgtctcctca

SEQ ID NO: 31320 - protein, 126 aa, synthetic construct
  REGION 1..126: note = Description of Artificial Sequence: Synthetic polypeptide
QVQLVESGGGVVQPGRSLRLSCAASGFTFSSYGMHWVRQAPGKGLEWVADIWFDGSNKYYVDSVKDRFTISRDNSKNTLYLQMNSLRAEDTAVYYCARDRVEGSGTPYYYYGMDVWGQGTTVTVSS

SEQ ID NO: 31321 - DNA, 387 bp, synthetic construct
  misc_feature 1..387: note = Description of Artificial Sequence: Synthetic polynucleotide
  source 1..387: mol_type = other DNA
caggtgcagctggtggagtctgggggaggcgtggtccagcctgggaggtccctgagactctcctgtgcagcgtctggattcaccttcagtacctatggcatgcactgggtccgccaggctccaggcaaggggctggagtgggtggcagttatatggtatggtggaagtgataaagactatgcagactccgtgaagggccgattcaccatctccagagacatttccaagaacacgctgtatctgcaaatgaacagcctgagagccgaggacacggctgtgtattactgtgcgagagatcgggattattgtagtggtggtacttgtccttactactactactacggtatggacgtctggggccaagggaccacggtcaccgtctcctca

SEQ ID NO: 31322 - protein, 129 aa, synthetic construct
  REGION 1..129: note = Description of Artificial Sequence: Synthetic polypeptide
QVQLVESGGGVVQPGRSLRLSCAASGFTFSTYGMHWVRQAPGKGLEWVAVIWYGGSDKDYADSVKGRFTISRDISKNTLYLQMNSLRAEDTAVYYCARDRDYCSGGTCPYYYYYGMDVWGQGTTVTVSS

SEQ ID NO: 31323 - DNA, 387 bp, synthetic construct
  misc_feature 1..387: note = Description of Artificial Sequence: Synthetic polynucleotide
  source 1..387: mol_type = other DNA
caggtgcagctggtggagtctgggggaggcgtggtccagcctgggaggtccctgagactctcctgtgcagcgtctggattcaccttcagtacctatggcatgcactgggtccgccaggctccaggcaaggggctggagtgggtggcagttatatggtatggtggaagtgataaagactatgcagactccgtgaagggccgattcaccatctccagagacatttccaagaacacgctgtatctgcaaatgaacagcctgagagccgaggacacggctgtgtattactgtgcgagagatcgggattattgtagtggtggtagctgcccttactactactactacggtatggacgtctggggccaagggaccacggtcaccgtctcctca

SEQ ID NO: 31324 - protein, 129 aa, synthetic construct
  REGION 1..129: note = Description of Artificial Sequence: Synthetic polypeptide
QVQLVESGGGVVQPGRSLRLSCAASGFTFSTYGMHWVRQAPGKGLEWVAVIWYGGSDKDYADSVKGRFTISRDISKNTLYLQMNSLRAEDTAVYYCARDRDYCSGGSCPYYYYYGMDVWGQGTTVTVSS

SEQ ID NO: 31325 - DNA, 363 bp, synthetic construct
  misc_feature 1..363: note = Description of Artificial Sequence: Synthetic polynucleotide
  source 1..363: mol_type = other DNA
gaggtgcaactgttggagtctgggggaggcttggtacagcctggggggtccctgagactctcctgtgcagcctctggattcacctttagcaactatgtcatgagctgggtccgccaggctccagggaaggggctggagtgggtctcagttattagtggtggtggtagtagtacatactacgcagactccgtgaagggccggttcaccatctccagagacaattccaagaacacgctgtatctgcaaatgaacagcctgagagccgaggacacggccgtatattactgtgcgaaatggcgaggtaaccccactgactacggtatggacgtctggggccaagggaccacggtcaccgtctcctca

SEQ ID NO: 31326 - protein, 121 aa, synthetic construct
  REGION 1..121: note = Description of Artificial Sequence: Synthetic polypeptide
EVQLLESGGGLVQPGGSLRLSCAASGFTFSNYVMSWVRQAPGKGLEWVSVISGGGSSTYYADSVKGRFTISRDNSKNTLYLQMNSLRAEDTAVYYCAKWRGNPTDYGMDVWGQGTTVTVSS

SEQ ID NO: 31327 - DNA, 363 bp, synthetic construct
  misc_feature 1..363: note = Description of Artificial Sequence: Synthetic polynucleotide
  source 1..363: mol_type = other DNA
gaggtgcaactgttggagtctgggggaggcttggtacagcctggggggtccctgagactctcctgtgcagcctctggattcacctttagcagctatgccatgagctgggtccgccaggctccagggaaggggctggagtgggtctcagttattagtggtggtggtagtagcacatactacgcagactccgtgaagggccggttcaccatctccagagacaattccaagaacacgctgtatctgcaaatgaacagcctgagagccgaggacacggccgtatattactgtgcgaaatggcgaggtaaccccactgactacggtatggacgtctggggccaagggaccacggtcaccgtctcctca

SEQ ID NO: 31328 - protein, 121 aa, synthetic construct; identical to SEQ ID NO: 31304
  REGION 1..121: note = Description of Artificial Sequence: Synthetic polypeptide

SEQ ID NO: 31329 - DNA, 369 bp, synthetic construct
  misc_feature 1..369: note = Description of Artificial Sequence: Synthetic polynucleotide
  source 1..369: mol_type = other DNA
caggtgcagctgcaggagtcgggcccaggactggtgaatccttcacagaccctgtccctcacctgcgctgtctctggtggctccatcagcagtggttattaccactggagctggatccgccagcacccagggaagggcctggagtggattgggtacatctattacagtgggagcacctactacaacccgtccctcaagagtcgagttaccatatcagttgacacgtctaagaaccagttctccctgaagctgacctctgtgactgccgcggacacggccgtgtattactgtgcgagagattggggtggctacgattcgagtggctggttcgacccctggggccagggaaccctggtcaccgtctcctca

SEQ ID NO: 31330 - protein, 123 aa, synthetic construct
  REGION 1..123: note = Description of Artificial Sequence: Synthetic polypeptide
QVQLQESGPGLVNPSQTLSLTCAVSGGSISSGYYHWSWIRQHPGKGLEWIGYIYYSGSTYYNPSLKSRVTISVDTSKNQFSLKLTSVTAADTAVYYCARDWGGYDSSGWFDPWGQGTLVTVSS

SEQ ID NO: 31331 - DNA, 375 bp, synthetic construct
  misc_feature 1..375: note = Description of Artificial Sequence: Synthetic polynucleotide
  source 1..375: mol_type = other DNA
gaggtgaagctggtggagtctgggggaggcttggtacagcctggggagtccctgagactctcctgtgtagcctctggattcaccttcagtaactataacatgaactgggtccgccaggctccagggaagggactggagtgggtttcatacattagtagaagtagtaataccaaatactacgcagactctgtgaggggccgattcaccatctccagagacaatgccaagaattcactatatctgcaaatgaacagcctgagagacgaggacacggctgtgtattactgtgcgagagataggagtgggagctacgggtacttctactactacggtttggacgtctggggccaagggaccacggtcaccgtctcctca

SEQ ID NO: 31332 - protein, 125 aa, synthetic construct
  REGION 1..125: note = Description of Artificial Sequence: Synthetic polypeptide
EVKLVESGGGLVQPGESLRLSCVASGFTFSNYNMNWVRQAPGKGLEWVSYISRSSNTKYYADSVRGRFTISRDNAKNSLYLQMNSLRDEDTAVYYCARDRSGSYGYFYYYGLDVWGQGTTVTVSS

SEQ ID NO: 31333 - DNA, 375 bp, synthetic construct
  misc_feature 1..375: note = Description of Artificial Sequence: Synthetic polynucleotide
  source 1..375: mol_type = other DNA
gaggtgcagctggtggagtctgggggaggcttggtacagcctggggggtccctgagactctcctgtgcagcctctggattcaccttcagtagctataacatgaactgggtccgccaggctccagggaaggggctggagtgggtttcatacattagtagaagtagtaataccaaacactacgcagactctgtgaagggccgattcaccatctccagagacaatgccaagaactcactgtatctgcaaatggacagcctgagagacgaggacacggctgtgtattactgtgcgagagataggagtgggagctacgggtacttctactactacggtttggacgtctggggccaagggaccacggtcaccgtctcctca

SEQ ID NO: 31334 - protein, 125 aa, synthetic construct
  REGION 1..125: note = Description of Artificial Sequence: Synthetic polypeptide
EVQLVESGGGLVQPGGSLRLSCAASGFTFSSYNMNWVRQAPGKGLEWVSYISRSSNTKHYADSVKGRFTISRDNAKNSLYLQMDSLRDEDTAVYYCARDRSGSYGYFYYYGLDVWGQGTTVTVSS

SEQ ID NO: 31335 - DNA, 363 bp, synthetic construct
  misc_feature 1..363: note = Description of Artificial Sequence: Synthetic polynucleotide
  source 1..363: mol_type = other DNA
gaggtgcaactgttggagtctgggggaggcttggtacagcctggggggtccctgagactctcctgtgcagcctctggattcacctttagcagctatgccatgagctgggtccgccaggctccagggaaggggctggagtgggtctcagttattagtggtggtggtagtagcacatactacgcagactccgtgaagggccggttcaccatctccagagacaattccaagaacatgctgcatctgcaaatgaacagcctgagagccgaggacacggccgtatattactgtgcgaaatggcgaggtaaccccactgactacggtatggacgtctggggccaagggaccacggtcaccgtctcctca

SEQ ID NO: 31336 - protein, 121 aa, synthetic construct
  REGION 1..121: note = Description of Artificial Sequence: Synthetic polypeptide
EVQLLESGGGLVQPGGSLRLSCAASGFTFSSYAMSWVRQAPGKGLEWVSVISGGGSSTYYADSVKGRFTISRDNSKNMLHLQMNSLRAEDTAVYYCAKWRGNPTDYGMDVWGQGTTVTVSS

SEQ ID NO: 31337 - DNA, 378 bp, synthetic construct
  misc_feature 1..378: note = Description of Artificial Sequence: Synthetic polynucleotide
  source 1..378: mol_type = other DNA
caggtgcagctggtggagtctgggggaggcgtggtccagcctgggaggtccctgagactctcctgtgcagcgtctggattcaccttcagtagctatggcatgcactgggtccgccaggctccaggcaaggggctggagtgggtggcagttatatggtatgatggaagtaataaatactatgcagactccgtgaagggccgattcaccatctccagagacaattccaagaacacgctgtatctgcaaatgaacagcctgagagccgaggacacggctgtgtattactgtgcgagagatcgtgactacggtgaccccccctactactactactacggtatggacgtctggggccaagggaccacggtcaccgtctcctca

SEQ ID NO: 31338 - protein, 126 aa, synthetic construct; identical to SEQ ID NO: 31318
  REGION 1..126: note = Description of Artificial Sequence: Synthetic polypeptide

SEQ ID NO: 31339 - DNA, 387 bp, synthetic construct; identical to SEQ ID NO: 31321
  misc_feature 1..387: note = Description of Artificial Sequence: Synthetic polynucleotide
  source 1..387: mol_type = other DNA

SEQ ID NO: 31340 - protein, 129 aa, synthetic construct; identical to SEQ ID NO: 31322
  REGION 1..129: note = Description of Artificial Sequence: Synthetic polypeptide

SEQ ID NO: 31341 - DNA, 363 bp, synthetic construct
  misc_feature 1..363: note = Description of Artificial Sequence: Synthetic polynucleotide
  source 1..363: mol_type = other DNA
gaggtgcaactgttggagtctgggggaggcttggtacagcctggggggtccctgagactctcctgtgcagcctctggattcacctttagcagctatcccatgagctgggtccgccaggctcccgggaaggggctggagtgggtctcagttattagtggtggtggtagtagtgcatactacgcagactccgtgaagggccggttcaccatctccagagacaattccaagaacacgctgtatctgcaaatgaacagcctgagagccgaggacacggccgtatattactgtgcgaaatggcgaggtaaccccactgactacggtatggacgtctggggccaagggaccacggtcaccgtctcctca

SEQ ID NO: 31342 - protein, 121 aa, synthetic construct
  REGION 1..121: note = Description of Artificial Sequence: Synthetic polypeptide
EVQLLESGGGLVQPGGSLRLSCAASGFTFSSYPMSWVRQAPGKGLEWVSVISGGGSSAYYADSVKGRFTISRDNSKNTLYLQMNSLRAEDTAVYYCAKWRGNPTDYGMDVWGQGTTVTVSS

SEQ ID NO: 31343 - DNA, 375 bp, synthetic construct
  misc_feature 1..375: note = Description of Artificial Sequence: Synthetic polynucleotide
  source 1..375: mol_type = other DNA
gaggtgcagctggtggagtctgggggaggcttggtacagcctggggggtccctgagactctcctgtgcagcctctggattcaccttcagtagctataacatgaactgggtccgccaggctccagggaaggggctggagtgggtttcatacattagtagaagtagtaataccaaacactacgcagactctgtgaagggccgattcaccatctccagagacaatgccaagaactcactgtatctgcaaatgaacagcctgagagacgaggacacggctgtgtattactgtgcgagagataggagtgggagctacgggtacttctactactacggtttggacgtctggggccaagggaccacggtcaccgtctcctca

SEQ ID NO: 31344 - protein, 125 aa, synthetic construct
  REGION 1..125: note = Description of Artificial Sequence: Synthetic polypeptide
EVQLVESGGGLVQPGGSLRLSCAASGFTFSSYNMNWVRQAPGKGLEWVSYISRSSNTKHYADSVKGRFTISRDNAKNSLYLQMNSLRDEDTAVYYCARDRSGSYGYFYYYGLDVWGQGTTVTVSS

SEQ ID NO: 31345 - DNA, 363 bp, synthetic construct
  misc_feature 1..363: note = Description of Artificial Sequence: Synthetic polynucleotide
  source 1..363: mol_type = other DNA
gaggtgcagctggtggagtctgggggaggcttggtccagcctggggggtccctgagactctcctgtgcagcctctggattcacctttagtggctattggatgaactgggtccgccaggctccagggaaggggctggagtgggtggccaacataaagcaagatggaagtgagaaatactatgtggactctgtgaagggccgattcaccatctccagagacaacgccaagaattcactgtatctgcaaatgaacagcctgagagccgaggacacggctgtgtattactgtgcgagagggatgtatagcagtggctggtacgtctttgactactggggccagggaaccctggtcaccgtctcctca

SEQ ID NO: 31346 - protein, 121 aa, synthetic construct
  REGION 1..121: note = Description of Artificial Sequence: Synthetic polypeptide
EVQLVESGGGLVQPGGSLRLSCAASGFTFSGYWMNWVRQAPGKGLEWVANIKQDGSEKYYVDSVKGRFTISRDNAKNSLYLQMNSLRAEDTAVYYCARGMYSSGWYVFDYWGQGTLVTVSS

SEQ ID NO: 31347 - DNA, 363 bp, synthetic construct; identical to SEQ ID NO: 31327
  misc_feature 1..363: note = Description of Artificial Sequence: Synthetic polynucleotide
  source 1..363: mol_type = other DNA

SEQ ID NO: 31348 - protein, 121 aa, synthetic construct; identical to SEQ ID NO: 31304
  REGION 1..121: note = Description of Artificial Sequence: Synthetic polypeptide

SEQ ID NO: 31349 - DNA, 360 bp, synthetic construct
  misc_feature 1..360: note = Description of Artificial Sequence: Synthetic polynucleotide
  source 1..360: mol_type = other DNA
gaggtgcagctggtggagtctgggggaggcctggtcaagcctggggggtccctgagactctcctgtgcagcctctggattcaccttcagtagttatagcatgaactgggtccgccgggctccagggaaggggctggagtgggtctcagccattagtagtactggtagttacatatattacgcagactcagtgaagggccgattcaccatctccagagacaacgccaagaactcactgtatctgcaaatgaacagcctgagagccgaggacacggctgtgtattactgtgcgaggacggcagtggctggtactgggtggttcgacccctggggccagggaaccctggtcaccgtctcctca

SEQ ID NO: 31350 - protein, 120 aa, synthetic construct
  REGION 1..120: note = Description of Artificial Sequence: Synthetic polypeptide
EVQLVESGGGLVKPGGSLRLSCAASGFTFSSYSMNWVRRAPGKGLEWVSAISSTGSYIYYADSVKGRFTISRDNAKNSLYLQMNSLRAEDTAVYYCARTAVAGTGWFDPWGQGTLVTVSS

SEQ ID NO: 31351 - DNA, 363 bp, synthetic construct
  misc_feature 1..363: note = Description of Artificial Sequence: Synthetic polynucleotide
  source 1..363: mol_type = other DNA
gaggtgcaactgttggagtctgggggaggcttggtacagcctggggggtccctgagattctcctgtgcagcctctggattcacctttagcagccacgccatgagctgggtccgccaggctccagggaaggggctggagtgggtctcagttataagtggaggtggtagtagcacatattacgcagactccgtgaagggccggttcaccatctccagagacaattccaagaacacgctgtatctgcaaatgaacagcctgagagccgaggacacggccgtatattactgtgcgaaatggcgaggtaaccccactgactacggtatggacgtctggggccaagggaccacggtcaccgtctcctca

SEQ ID NO: 31352 - protein, 121 aa, synthetic construct
  REGION 1..121: note = Description of Artificial Sequence: Synthetic polypeptide
EVQLLESGGGLVQPGGSLRFSCAASGFTFSSHAMSWVRQAPGKGLEWVSVISGGGSSTYYADSVKGRFTISRDNSKNTLYLQMNSLRAEDTAVYYCAKWRGNPTDYGMDVWGQGTTVTVSS

SEQ ID NO: 31353 - DNA, 378 bp, synthetic construct; identical to SEQ ID NO: 31337
  misc_feature 1..378: note = Description of Artificial Sequence: Synthetic polynucleotide
  source 1..378: mol_type = other DNA

SEQ ID NO: 31354 - protein, 126 aa, synthetic construct; identical to SEQ ID NO: 31318
  REGION 1..126: note = Description of Artificial Sequence: Synthetic polypeptide

SEQ ID NO: 31355 - DNA, 387 bp, synthetic construct
  misc_feature 1..387: note = Description of Artificial Sequence: Synthetic polynucleotide
  source 1..387: mol_type = other DNA
caggtgcagctggtggagtctgggggaggcgtggtccagcctgggaggtccctgagactctcctgtgcagcgtctggattcaccttcagtacctatggcatgcactgggtccgccaggctccaggcaaggggctggagtgggtggcagttatatggtatggtggaagtaataaagactatgcagactccgtgaagggccgattcaccatctccagagacaattccaagaacacgctgtatctgcaaatgaacagtttgagagccgaggacacggctgtgtattactgtgcgagagatcgggattattgtagtggtggtacctgcccttactactactactacggtatggacgtctggggccaagggaccacggtcaccgtctcctca

SEQ ID NO: 31356 - protein, 129 aa, synthetic construct
  REGION 1..129: note = Description of Artificial Sequence: Synthetic polypeptide
QVQLVESGGGVVQPGRSLRLSCAASGFTFSTYGMHWVRQAPGKGLEWVAVIWYGGSNKDYADSVKGRFTISRDNSKNTLYLQMNSLRAEDTAVYYCARDRDYCSGGTCPYYYYYGMDVWGQGTTVTVSS

SEQ ID NO: 31357 - DNA, 363 bp, synthetic construct; identical to SEQ ID NO: 31327
  misc_feature 1..363: note = Description of Artificial Sequence: Synthetic polynucleotide
  source 1..363: mol_type = other DNA

SEQ ID NO: 31358 - protein, 121 aa, synthetic construct; identical to SEQ ID NO: 31304
  REGION 1..121: note = Description of Artificial Sequence: Synthetic polypeptide

SEQ ID NO: 31359 - DNA, 375 bp, synthetic construct
  misc_feature 1..375: note = Description of Artificial Sequence: Synthetic polynucleotide
  source 1..375: mol_type = other DNA
gagatgcagctggtggagtctgggggaggcttggtacagcctggggggtccctgagactctcctgtgcagcctctggattcaccttcagtagctataacatgaactgggtccgccaggttccagggaaggggctggagtgggtttcatacattagtagaagtagtaataccaaacactacgcagactctgtgaagggccgattcaccatctccagagacaatgccaagaactcactgtatctgcaaatgaacagcctgagagacgaggacacggctgtgtattactgtgcgagagataggagtgggagctacgggtacttctactactacggtttggacgtctggggccaagggaccacggtcaccgtctcctca

SEQ ID NO: 31360 - protein, 125 aa, synthetic construct
  REGION 1..125: note = Description of Artificial Sequence: Synthetic polypeptide
EMQLVESGGGLVQPGGSLRLSCAASGFTFSSYNMNWVRQVPGKGLEWVSYISRSSNTKHYADSVKGRFTISRDNAKNSLYLQMNSLRDEDTAVYYCARDRSGSYGYFYYYGLDVWGQGTTVTVSS

SEQ ID NO: 31361 - DNA, 363 bp, synthetic construct
  misc_feature 1..363: note = Description of Artificial Sequence: Synthetic polynucleotide
  source 1..363: mol_type = other DNA
gaggtgcaactgttggagtctgggggaggcttggtacagcctggggggtccctgagactctcctgtgcagcctctggattcacctttagcacctatgccatgagctgggtccgccaggctccagggaaggggctggagtgggtctcaattattagtggtggtggtagtagcacatactacgcagactccgtgaagggccggttcaccatctccagagacaattccaagaacacgctgtatctgcaaatgaacagcctgagagccgaggacacggccgtatattactgtgcgaaatggcgaggtaaccccactgactacggtatggacgtctggggccaagggaccacggtcaccgtctcctca

SEQ ID NO: 31362 - protein, 121 aa, synthetic construct
  REGION 1..121: note = Description of Artificial Sequence: Synthetic polypeptide
EVQLLESGGGLVQPGGSLRLSCAASGFTFSTYAMSWVRQAPGKGLEWVSIISGGGSSTYYADSVKGRFTISRDNSKNTLYLQMNSLRAEDTAVYYCAKWRGNPTDYGMDVWGQGTTVTVSS

SEQ ID NO: 31363 - DNA, 387 bp, synthetic construct
  misc_feature 1..387: note = Description of Artificial Sequence: Synthetic polynucleotide
  source 1..387: mol_type = other DNA
caggtgcagctggtggagtctgggggaggcgtggtccagcctgggaggtccctgagactctcctgtgcagcgtctggattcaccttcagtacctatggcatgcactgggtccgccaggctccaggcaaggggctggagtgggtggcagttatatggtatggtggaagtaatacagactatgcagactccgtgaagggccgattcaccatctccagagacatttccaagaacacgctgtatctgcaaatgaacagcctgagagccgaggacacggctgtgtattactgtgcgagagatcgggattattgtagtggtactagctgcccttactactactactacggtatggacgtctggggccaagggaccacggtcaccgtctcctca

SEQ ID NO: 31364 - protein, 129 aa, synthetic construct
  REGION 1..129: note = Description of Artificial Sequence: Synthetic polypeptide
QVQLVESGGGVVQPGRSLRLSCAASGFTFSTYGMHWVRQAPGKGLEWVAVIWYGGSNTDYADSVKGRFTISRDISKNTLYLQMNSLRAEDTAVYYCARDRDYCSGTSCPYYYYYGMDVWGQGTTVTVSS

SEQ ID NO: 31365 - DNA, 363 bp, synthetic construct
  misc_feature 1..363: note = Description of Artificial Sequence: Synthetic polynucleotide
  source 1..363: mol_type = other DNA
gaggtgcaactgttggagtctgggggaggcttggtacagcctggggggtccctgagactctcctgtgcagcctctggattcaccttcagcagctatgccatgagctgggtccgccaggctccagggaaggggctggagtgggtctcagttattagtggtggtggtagtagcacatactacgcagactccgtgaagggccggttcaccatctccagagacaattccaagaacacgctgtatctgcaaatgaacagcctgagagccgaggacacggccgtatattactgtgcgaaatggcgaggtaaccccactgactacggtatggacgtctggggccaagggaccacggtcaccgtctcctca

SEQ ID NO: 31366 - protein, 121 aa, synthetic construct; identical to SEQ ID NO: 31304
  REGION 1..121: note = Description of Artificial Sequence: Synthetic polypeptide

SEQ ID NO: 31367 - DNA, 387 bp, synthetic construct
  misc_feature 1..387: note = Description of Artificial Sequence: Synthetic polynucleotide
  source 1..387: mol_type = other DNA
caggtgcagctggtggagtctgggggaggcgtggtccagcctgggaggtccctgagactctcctgtgcagcgtctggattcaccttcagtgactatggcatgcactgggtccgccaggctccaggcaaggggctggagtgggtggcacttatatggtatgatggaagtaataaatactatgcagactccgtgaagggccgattcaccatctccagagacaattccaagaacacgctgtatctacaaatgaacagcctgagagccgaggacacggctgtgtattactgtgcgagagatgaccgatcttgtagtagaaccagctgcccttactactactactacggtttggacgtctggggccaagggaccacggtcatcgtctcctca

SEQ ID NO: 31368 - protein, 129 aa, synthetic construct
  REGION 1..129: note = Description of Artificial Sequence: Synthetic polypeptide
QVQLVESGGGVVQPGRSLRLSCAASGFTFSDYGMHWVRQAPGKGLEWVALIWYDGSNKYYADSVKGRFTISRDNSKNTLYLQMNSLRAEDTAVYYCARDDRSCSRTSCPYYYYYGLDVWGQGTTVIVSS

SEQ ID NO: 31369 - DNA, 363 bp, synthetic construct; identical to SEQ ID NO: 31327
  misc_feature 1..363: note = Description of Artificial Sequence: Synthetic polynucleotide
  source 1..363: mol_type = other DNA

SEQ ID NO: 31370 - protein, 121 aa, synthetic construct; identical to SEQ ID NO: 31304
  REGION 1..121: note = Description of Artificial Sequence: Synthetic polypeptide

SEQ ID NO: 31371 - DNA, 363 bp, synthetic construct; identical to SEQ ID NO: 31365
  misc_feature 1..363: note = Description of Artificial Sequence: Synthetic polynucleotide
  source 1..363: mol_type = other DNA

SEQ ID NO: 31372 - protein, 121 aa, synthetic construct; identical to SEQ ID NO: 31304
  REGION 1..121: note = Description of Artificial Sequence: Synthetic polypeptide

SEQ ID NO: 31373 - DNA, 387 bp, synthetic construct; identical to SEQ ID NO: 31367
  misc_feature 1..387: note = Description of Artificial Sequence: Synthetic polynucleotide
  source 1..387: mol_type = other DNA

SEQ ID NO: 31374 - protein, 129 aa, synthetic construct; identical to SEQ ID NO: 31368
  REGION 1..129: note = Description of Artificial Sequence: Synthetic polypeptide

SEQ ID NO: 31375 - DNA, 363 bp, synthetic construct; identical to SEQ ID NO: 31327
  misc_feature 1..363: note = Description of Artificial Sequence: Synthetic polynucleotide
  source 1..363: mol_type = other DNA

SEQ ID NO: 31376 - protein, 121 aa, synthetic construct; identical to SEQ ID NO: 31304
  REGION 1..121: note = Description of Artificial Sequence: Synthetic polypeptide

SEQ ID NO: 31377 - DNA, 363 bp, synthetic construct
  misc_feature 1..363: note = Description of Artificial Sequence: Synthetic polynucleotide
  source 1..363: mol_type = other DNA
gaggtgcaactgttggagtctgggggaggcttggtacagcctggggggtccctgagactctcctgtgcagcctctggattcacctttagcagctatgccatgagctgggtccgccaggctccagggaaggggctggagtgggtctcagttattagtggtggtggtagtagcacatactacgcagactccgtgaagggccggttcaccatctccagagacaattccaagaacacgctgtatctgcaaatgaacagcctgagagccgaggacacggccgtatattactgtgcgaaatggcgaggtaaccccactgactccggtatggacgtctggggccaagggaccacggtcaccgtctcctca

SEQ ID NO: 31378 - protein, 121 aa, synthetic construct
  REGION 1..121: note = Description of Artificial Sequence: Synthetic polypeptide
EVQLLESGGGLVQPGGSLRLSCAASGFTFSSYAMSWVRQAPGKGLEWVSVISGGGSSTYYADSVKGRFTISRDNSKNTLYLQMNSLRAEDTAVYYCAKWRGNPTDSGMDVWGQGTTVTVSS

SEQ ID NO: 31379 - DNA, 387 bp, synthetic construct
  misc_feature 1..387: note = Description of Artificial Sequence: Synthetic polynucleotide
  source 1..387: mol_type = other DNA
caggtgcaggtggtggagtctgggggaggcgtggtccagcctgggaggtccctgagactctcctgtgcagcgtctggattcaccttcagtgactatggcatgcactgggtccgccaggctccaggcaaggggctggagtgggtggcagttatatggtatgatggaagtaataaatactatgcagactccgtgaagggccgattcaccatctccagagacaattccaagaacacgctgtatctacaaatgaacagcctgagagccgaggacacggctgtgtattactgtgcgagagatgaccgatcttgtagtagtaccagctgcccttactactactactacggtttggacgtctggggccaagggaccacggtcaccgtctcctca

SEQ ID NO: 31380 - protein, 129 aa, synthetic construct
  REGION 1..129: note = Description of Artificial Sequence: Synthetic polypeptide
QVQVVESGGGVVQPGRSLRLSCAASGFTFSDYGMHWVRQAPGKGLEWVAVIWYDGSNKYYADSVKGRFTISRDNSKNTLYLQMNSLRAEDTAVYYCARDDRSCSSTSCPYYYYYGLDVWGQGTTVTVSS

SEQ ID NO: 31381 - DNA, 387 bp, synthetic construct
  misc_feature 1..387: note = Description of Artificial Sequence: Synthetic polynucleotide
  source 1..387: mol_type = other DNA
caggtgcagctgatggagtctgggggaggcgtggtccagcctgggaggtccctgagactctcctgtgcagcgtctggattcaccttcagtgactatggcatgcactgggtccgccaggctccaggcaaggggctggagtgggtggcacttatatggtatgatggaagtaataaatactatgcagactccgtgaagggccgattcaccatctccagagacaattccaagaacacgctttatctacaaatgaacagcctgagagccgaggacacggctgtgtattactgtgcgagagatgaccgatcttgtagtagaaccagctgcccttactactactactacggtttggacgtctggggccaagggaccacggtcatcgtctcctca

SEQ ID NO: 31382 - protein, 129 aa, synthetic construct
  REGION 1..129: note = Description of Artificial Sequence: Synthetic polypeptide
QVQLMESGGGVVQPGRSLRLSCAASGFTFSDYGMHWVRQAPGKGLEWVALIWYDGSNKYYADSVKGRFTISRDNSKNTLYLQMNSLRAEDTAVYYCARDDRSCSRTSCPYYYYYGLDVWGQGTTVIVSS

SEQ ID NO: 31383 - DNA, 378 bp, synthetic construct
  misc_feature 1..378: note = Description of Artificial Sequence: Synthetic polynucleotide
  source 1..378: mol_type = other DNA
caggtgcagctggtggagtctgggggaggcgtggtccagcctgggaggtccctgagactctcctgtgcagcgtctggattcaccctcagtaactatggcatgcactgggtccgccaggctccaggcaaggggctggagtgggtggcagttatatggtttgatggcagtaataaatactatgttgactccgtgaaggaccgattcaccatctccagagacaattccaagaacacgctatatctgcaaatgaacagcctgagagccgaagacacggctgtgtattactgtgcgagagatcgggtggagggttcggggactccctactactactacggtatggacgtctggggccaagggaccacggtcaccgtctcctca

SEQ ID NO: 31384 - protein, 126 aa, synthetic construct
  REGION 1..126: note = Description of Artificial Sequence: Synthetic polypeptide
QVQLVESGGGVVQPGRSLRLSCAASGFTLSNYGMHWVRQAPGKGLEWVAVIWFDGSNKYYVDSVKDRFTISRDNSKNTLYLQMNSLRAEDTAVYYCARDRVEGSGTPYYYYGMDVWGQGTTVTVSS

SEQ ID NO: 31385 - DNA, 387 bp, synthetic construct
  misc_feature 1..387: note = Description of Artificial Sequence: Synthetic polynucleotide
  source 1..387: mol_type = other DNA
caggtgcagttggtggagtctgggggaggcgtggtccagcctgggaggtccctgagactctcctgtgcagcgtctggattcaccgtcagtacctatggcatgcactgggtccgccaggctccaggcaaggggctggagtgggtggcagttatatggtatggtggaagtaataaagactatgcagactccgtgaagggccgattcaccatctccagagacatttccaagaacacgctgtatctgcaaatgaacagcctgagagccgaggacacggctgtgtattactgtgcgagagatcgggattattgtagtggtggtagctgtccttactactactactacggtatggacgtctggggccaagggaccacggtcaccgtctcctca

SEQ ID NO: 31386 - protein, 129 aa, synthetic construct
  REGION 1..129: note = Description of Artificial Sequence: Synthetic polypeptide
QVQLVESGGGVVQPGRSLRLSCAASGFTVSTYGMHWVRQAPGKGLEWVAVIWYGGSNKDYADSVKGRFTISRDISKNTLYLQMNSLRAEDTAVYYCARDRDYCSGGSCPYYYYYGMDVWGQGTTVTVSS

SEQ ID NO: 31387 - DNA, 387 bp, synthetic construct
  misc_feature 1..387: note = Description of Artificial Sequence: Synthetic polynucleotide
  source 1..387: mol_type = other DNA
caggtgcagctggtggagtctgggggaggcgtggtccagcctgggaggtccctgagactctcctgtacagcgtctggattcaccttcagtacctatggcatgcactgggtccgccaggctccaggcaaggggctggagtgggtggcagttgtatggtatggtggaaataataaagactatgcagactccgtgaagggccgattcaccatctccagagacatttccaagaacacactgtatctgcaaatgaacagcctgagagccgaggacacggctgtgtattactgtgcgagagatcgggattattgtagtggtggtagctgcccttactactactactacggtatggacgtctggggccaagggaccacggtcaccgtctcctca

SEQ ID NO: 31388 - protein, 129 aa, synthetic construct
  REGION 1..129: note = Description of Artificial Sequence: Synthetic polypeptide
QVQLVESGGGVVQPGRSLRLSCTASGFTFSTYGMHWVRQAPGKGLEWVAVVWYGGNNKDYADSVKGRFTISRDISKNTLYLQMNSLRAEDTAVYYCARDRDYCSGGSCPYYYYYGMDVWGQGTTVTVSS

SEQ ID NO: 31389 - DNA, 363 bp, synthetic construct
  misc_feature 1..363: note = Description of Artificial Sequence: Synthetic polynucleotide
  source 1..363: mol_type = other DNA
gaggtgcaactgttggagtctgggggaggcttgatacagcctggggggtccctgagactctcctgtgcagcctctggattcacctttagcagctatgccatgagctgggtccgccaggctccagggaaggggctggagtgggtctcagttattagtggtggtggtagtagcacatactacgcagactccgtgaagggccggttcaccatctccagagacaattccaagaacacgctgtatctgcaaatgaacagcctgagagccgaggacacggccgtatattactgtgcgaaatggcgaggtaaccccactgactacggtatggacgtctggggccaagggaccacggtcaccgtctcctca

SEQ ID NO: 31390 - protein, 121 aa, synthetic construct
  REGION 1..121: note = Description of Artificial Sequence: Synthetic polypeptide
EVQLLESGGGLIQPGGSLRLSCAASGFTFSSYAMSWVRQAPGKGLEWVSVISGGGSSTYYADSVKGRFTISRDNSKNTLYLQMNSLRAEDTAVYYCAKWRGNPTDYGMDVWGQGTTVTVSS

SEQ ID NO: 31391 - DNA, 387 bp, synthetic construct
  misc_feature 1..387: note = Description of Artificial Sequence: Synthetic polynucleotide
  source 1..387: mol_type = other DNA
caggtgcagctggtggagtctgggggaggcgtggtccagcctgggaggtccctgagactctcctgtgcagcgtctggattcaccttcagtagctatggcatgcactgggtccgccaggctccaggcaaggggctggagtgggtggcagttatatggtatgatggaagtaataaatactatgcagactccgtgaagggccgattcaccatctccagagacaattccaagaacacgctgtatctgcaaatgaacagcctgagagccgaggacacggctgtgtattactgtgcgagagaggattcctattgtagtggtaccagctgcccctactactactactacggtatggacgtctggggccaagggaccacggtcaccgtctcctca

SEQ ID NO: 31392 - protein, 129 aa, synthetic construct
  REGION 1..129: note = Description of Artificial Sequence: Synthetic polypeptide
QVQLVESGGGVVQPGRSLRLSCAASGFTFSSYGMHWVRQAPGKGLEWVAVIWYDGSNKYYADSVKGRFTISRDNSKNTLYLQMNSLRAEDTAVYYCAREDSYCSGTSCPYYYYYGMDVWGQGTTVTVSS

SEQ ID NO: 31393 - DNA, 363 bp, synthetic construct; identical to SEQ ID NO: 31327
  misc_feature 1..363: note = Description of Artificial Sequence: Synthetic polynucleotide
  source 1..363: mol_type = other DNA

SEQ ID NO: 31394 - protein, 121 aa, synthetic construct; identical to SEQ ID NO: 31304
  REGION 1..121: note = Description of Artificial Sequence: Synthetic polypeptide

SEQ ID NO: 31395 - DNA, 387 bp, synthetic construct
  misc_feature 1..387: note = Description of Artificial Sequence: Synthetic polynucleotide
  source 1..387: mol_type = other DNA
caggtgcagctggtggagtctgggggaggggtggtccagcctgggaggtccctgagactctcctgtgcagcgtctggattcaacgtcagtacctatggcatgcactgggtccgccaggctccaggcaaggggctggagtgggtggcagttatatggtatggtggaagtaataaagactatgcagactctgtgaagggccgattcaccatctccagagacagttccaagaacacgctgtatctgcaaatgaacagcctgagagccgaggacacggctgtgtattactgtgcgagagatcgggattattgtagtggtggtagttgcccttactactactactacggtatggacgtctggggccaagggaccacggtcaccgtctcctca

SEQ ID NO: 31396 - protein, 129 aa, synthetic construct
  REGION 1..129: note = Description of Artificial Sequence: Synthetic polypeptide
QVQLVESGGGVVQPGRSLRLSCAASGFNVSTYGMHWVRQAPGKGLEWVAVIWYGGSNKDYADSVKGRFTISRDSSKNTLYLQMNSLRAEDTAVYYCARDRDYCSGGSCPYYYYYGMDVWGQGTTVTVSS

SEQ ID NO: 31397 - DNA, 369 bp, synthetic construct
  misc_feature 1..369: note = Description of Artificial Sequence: Synthetic polynucleotide
  source 1..369: mol_type = other DNA
caggtgcagctgcaggagtcgggcccaggactggtgaatccttcacagaccctgtccctcacctgcggtgtctctggtggctccatcagcagtggttattactactggagctggatccgccagcacccagggaagggcctggagtggattgggtacatctattatagtgggagcacctactacaacccgtccctcaagagtcgagtttccatatcattagacacgcctaagaaccagttctccctgaagctgacctctgtgactgccgcggacacggccgtgtattactgtgcgagagattggggtggctacgattcgagtggctggttcgacccctggggccagggaaccctggtcaccgtctcctca

SEQ ID NO: 31398 - protein, 123 aa, synthetic construct
  REGION 1..123: note = Description of Artificial Sequence: Synthetic polypeptide
QVQLQESGPGLVNPSQTLSLTCGVSGGSISSGYYYWSWIRQHPGKGLEWIGYIYYSGSTYYNPSLKSRVSISLDTPKNQFSLKLTSVTAADTAVYYCARDWGGYDSSGWFDPWGQGTLVTVSS

SEQ ID NO: 31399 - DNA, 375 bp, synthetic construct
  misc_feature 1..375: note = Description of Artificial Sequence: Synthetic polynucleotide
  source 1..375: mol_type = other DNA
gaggtgcagctagtgcagtctggagcagaggtgaaaaagcccggggagtctctgaagatctcctgtaagggttctggatacagctttaccagctactggatcggctgggtgcgccagatgcccgggaaaggcctggagtggatggggctcatctatcctggtgcctctgataccagatacagcccgtccttccaaggccaggtcaccatctcagccgacaagtccatcagcaccgcctacctgcagtggagcagcctgaaggcctcggacaccgccatgtattactgtgcgagacaggccatagcaagtcgagggaggtactactactacggtatggacgtctggggccaagggaccacggtcaccgtctcctca

SEQ ID NO: 31400 - protein, 125 aa, synthetic construct
  REGION 1..125: note = Description of Artificial Sequence: Synthetic polypeptide
EVQLVQSGAEVKKPGESLKISCKGSGYSFTSYWIGWVRQMPGKGLEWMGLIYPGASDTRYSPSFQGQVTISADKSISTAYLQWSSLKASDTAMYYCARQAIASRGRYYYYGMDVWGQGTTVTVSS

SEQ ID NO: 31401 - DNA, 369 bp, synthetic construct
  misc_feature 1..369: note = Description of Artificial Sequence: Synthetic polynucleotide
  source 1..369: mol_type = other DNA
caggtgcagctggtggagtctgggggaggcgtggtccagcctgggaggtccctgagactctcctgtacagcctctggattcaccttcagtagctatggcatgcactgggtccgccaggctccaggcaaggggctggagtgggtggcagttatatcatatgatggaagtaataaatactatgcagactccgtgaagggccgattcaccatctccagagacaattccaagaacacgctgtatctgcaaatgaacagcctgagagctgaggacacggctgtgtattactgtgcgagagatacggagagatggctaccatactcctacggtatggacgtctggggccaagggaccacggtcaccgtctcctca

SEQ ID NO: 31402 - protein, 123 aa, synthetic construct
  REGION 1..123: note = Description of Artificial Sequence: Synthetic polypeptide
QVQLVESGGGVVQPGRSLRLSCTASGFTFSSYGMHWVRQAPGKGLEWVAVISYDGSNKYYADSVKGRFTISRDNSKNTLYLQMNSLRAEDTAVYYCARDTERWLPYSYGMDVWGQGTTVTVSS

SEQ ID NO: 31403 - DNA, 390 bp, synthetic construct
  misc_feature 1..390: note = Description of Artificial Sequence: Synthetic polynucleotide
  source 1..390: mol_type = other DNA
caggtgcagctggaggagtctgggggaggcgtggtccagcctgggaggtccctgagactctcctgtgcagcgtctggattcaccttcagtggctatggcatgcactgggtccgccaggctccaggcaaggggctggagtggatgacacttatacggtatgatggaagcgataaaaactatgcagactccgtgaagggccgattcaccatctccagagacaactccaagaacacgctgtatctgcaaatgaacagcctgagagccgaggacacggctgtgtattactgtgcgagagatcgggttttttgtagtagtaccagctgcctctcttactactactactacggtatggacgtctggggccaagggaccacggtcaccgtctcctca

SEQ ID NO: 31404 - protein, 130 aa, synthetic construct
  REGION 1..130: note = Description of Artificial Sequence: Synthetic polypeptide
QVQLEESGGGVVQPGRSLRLSCAASGFTFSGYGMHWVRQAPGKGLEWMTLIRYDGSDKNYADSVKGRFTISRDNSKNTLYLQMNSLRAEDTAVYYCARDRVFCSSTSCLSYYYYYGMDVWGQGTTVTVSS

SEQ ID NO: 31405 - DNA, 363 bp, synthetic construct; identical to SEQ ID NO: 31327
  misc_feature 1..363: note = Description of Artificial Sequence: Synthetic polynucleotide
  source 1..363: mol_type = other DNA

SEQ ID NO: 31406 - protein, 121 aa, synthetic construct; identical to SEQ ID NO: 31304
  REGION 1..121: note = Description of Artificial Sequence: Synthetic polypeptide

SEQ ID NO: 31407 - DNA, 378 bp, synthetic construct; identical to SEQ ID NO: 31337
  misc_feature 1..378: note = Description of Artificial Sequence: Synthetic polynucleotide
  source 1..378: mol_type = other DNA

SEQ ID NO: 31408 - protein, 126 aa, synthetic construct; identical to SEQ ID NO: 31318
  REGION 1..126: note = Description of Artificial Sequence: Synthetic polypeptide

SEQ ID NO: 31409 - DNA, 375 bp, synthetic construct
  misc_feature 1..375: note = Description of Artificial Sequence: Synthetic polynucleotide
  source 1..375: mol_type = other DNA
gaggtgcagctggtggagtctgggggaggcttgatacagcctggggggtccctgagactctcctgtgcagcctctggattcaccttcagtaactataacatgaactgggtccgccaggctccagggaaggggctggagtgggtttcatacattagtagaagtagtaataccaaatactacgcagactctgtgaagggccgattcaccatctccagagacaatgccaagaactcactgtatctgcaaatgaacagcctgagagacgaggacacggctgtgtattactgtgcgagagataggagtgggagctacgggtacttctactactacggtatggacgtctggggccaagggaccacggtcaccgtctcctca

SEQ ID NO: 31410 - protein, 125 aa, synthetic construct
  REGION 1..125: note = Description of Artificial Sequence: Synthetic polypeptide
EVQLVESGGGLIQPGGSLRLSCAASGFTFSNYNMNWVRQAPGKGLEWVSYISRSSNTKYYADSVKGRFTISRDNAKNSLYLQMNSLRDEDTAVYYCARDRSGSYGYFYYYGMDVWGQGTTVTVSS

SEQ ID NO: 31411 - DNA, 387 bp, synthetic construct
  misc_feature 1..387: note = Description of Artificial Sequence: Synthetic polynucleotide
  source 1..387: mol_type = other DNA
caggtgcagctggtggagtctgggggaggcgtggtccagcctgggaggtccctgagactctcctgtgcagcgtctggattcaccttcagtagctatggcatgcactgggtccgccaggctccaggcaaggggctggagtgggtggcagttatatggtatgatggaagtagtaaatactatgcagactccgtgaagggccgattcaccatctccagagacaattccaagaacacgctgtatctgcaaatgaacagcctgagagccgaggacacggctgtgtattactgtgcgagagatcgggttttttgtagtggtaccagctgcccttactactactactacggtatggacgtctggggccaagggaccacggtcaccgtctcctca

SEQ ID NO: 31412 - protein, 129 aa, synthetic construct
  REGION 1..129: note = Description of Artificial Sequence: Synthetic polypeptide
QVQLVESGGGVVQPGRSLRLSCAASGFTFSSYGMHWVRQAPGKGLEWVAVIWYDGSSKYYADSVKGRFTISRDNSKNTLYLQMNSLRAEDTAVYYCARDRVFCSGTSCPYYYYYGMDVWGQGTTVTVSS

SEQ ID NO: 31413 - DNA, 387 bp, synthetic construct
  misc_feature 1..387: note = Description of Artificial Sequence: Synthetic polynucleotide
  source 1..387: mol_type = other DNA
caggtgcagctggtggagtctgggggaggcgtggtccagcctgggaggtccctgagactctcctgtgcagcgtctggattcaccttcagtagctatggcatgcactgggtccgccaggctccaggcaaggggctggagtgggtggcagttatatggtatgatggaagtaataaatactatgcagactccgtgaagggccgattcaccatctccagagacaattccaagaacacgctgtatctgcaaatgaacagcctgagagccgaggacacggctgtgtattactgtgcgagagatcgggtttcttgtagtagtaccagctgcccttactactactactacggtatggacgtctggggccaagggaccacggtcaccgtctcctca

SEQ ID NO: 31414 - protein, 129 aa, synthetic construct
  REGION 1..129: note = Description of Artificial Sequence: Synthetic polypeptide
QVQLVESGGGVVQPGRSLRLSCAASGFTFSSYGMHWVRQAPGKGLEWVAVIWYDGSNKYYADSVKGRFTISRDNSKNTLYLQMNSLRAEDTAVYYCARDRVSCSSTSCPYYYYYGMDVWGQGTTVTVSS

SEQ ID NO: 31415 - DNA, 387 bp, synthetic construct
  misc_feature 1..387: note = Description of Artificial Sequence: Synthetic polynucleotide
  source 1..387: mol_type = other DNA
caggtgcagctggtggagtctgggggaggcgtggtccagcctgggaggtccctgagactctcctgtgcagcgtctggattcaccttcagtacctatggcatgcactgggtccgccaggctccaggcaaggggctggagtgggtggcagttatatggtatgatggaagtaataaatactatgcagactccgtgaagggccgattcaccatctccagagacaattccaagaacacgctgtatctgcaaatgaacagcctgagagccgaggacacggctgtgtattactgtgcgagagatcgggtttcttgtagtagtaccagctgcccttactactactactacggtatggacgtctggggccaagggaccacggtcaccgtctcctca

SEQ ID NO: 31416 - protein, 129 aa, synthetic construct
  REGION 1..129: note = Description of Artificial Sequence: Synthetic polypeptide
QVQLVESGGGVVQPGRSLRLSCAASGFTFSTYGMHWVRQAPGKGLEWVAVIWYDGSNKYYADSVKGRFTISRDNSKNTLYLQMNSLRAEDTAVYYCARDRVSCSSTSCPYYYYYGMDVWGQGTTVTVSS

SEQ ID NO: 31417 - DNA, 387 bp, synthetic construct; identical to SEQ ID NO: 31413
  misc_feature 1..387: note = Description of Artificial Sequence: Synthetic polynucleotide
  source 1..387: mol_type = other DNA

SEQ ID NO: 31418 - protein, 129 aa, synthetic construct; identical to SEQ ID NO: 31414
  REGION 1..129: note = Description of Artificial Sequence: Synthetic polypeptide

SEQ ID NO: 31419 - DNA, 363 bp, synthetic construct
  misc_feature 1..363: note = Description of Artificial Sequence: Synthetic polynucleotide
  source 1..363: mol_type = other DNA
caggtgcagctggtggagtctgggggaggcgtggtccagcctgggaggtccctgagactctcctgtgcagcgtctggattcaccttcagtagctatggcatgcactgggtccgccaggctccaggcaaggggctggagtgggtggcagttatatggtatgatggaagtaataaatactatgcagactccgtgaagggccgattcaccatctccagagacaattccaagaacacgctgtatctgcaaatgaacagcctgagagccgaggacacggctgtgtattactgtgcgagagtcgggtatagcggtggctggtacatctttgactactggggccagggaaccctggtcaccgtctcctca

SEQ ID NO: 31420 - protein, 121 aa, synthetic construct
  REGION 1..121: note = Description of Artificial Sequence: Synthetic polypeptide
QVQLVESGGGVVQPGRSLRLSCAASGFTFSSYGMHWVRQAPGKGLEWVAVIWYDGSNKYYADSVKGRFTISRDNSKNTLYLQMNSLRAEDTAVYYCARVGYSGGWYIFDYWGQGTLVTVSS

SEQ ID NO: 31421 - DNA, 387 bp, synthetic construct
  misc_feature 1..387: note = Description of Artificial Sequence: Synthetic polynucleotide
  source 1..387: mol_type = other DNA
caggtgcagctggtggagtctgggggaggcgtggtccagcctgggaggtccctgagactctcctgtgcagcgtctggattcaccttcagtagctatggcatgcactgggtccgccaggctccaggcaaggggctggagtgggtggcagttatatggtatgatggaagtaataaatactatgtagactccgtgaagggccgattcaccatctccagagacaattccaagaacacgctgtatctgcaaatgaacagcctgagagccgaggacacggctgtgtattactgtgcgagagatcgggttttttgtagtggtaccagctgcccttactactactactacggtatggacgtctggggccaagggaccacggtcaccgtctcctca

SEQ ID NO: 31422 - protein, 129 aa, synthetic construct
  REGION 1..129: note = Description of Artificial Sequence: Synthetic polypeptide
QVQLVESGGGVVQPGRSLRLSCAASGFTFSSYGMHWVRQAPGKGLEWVAVIWYDGSNKYYVDSVKGRFTISRDNSKNTLYLQMNSLRAEDTAVYYCARDRVFCSGTSCPYYYYYGMDVWGQGTTVTVSS

SEQ ID NO: 31423 - DNA, 390 bp, synthetic construct
  misc_feature 1..390: note = Description of Artificial Sequence: Synthetic polynucleotide
  source 1..390: mol_type = other DNA
caggtgcagctgcaggagtcgggcccaggactggtgaagccttcacagaccctgtccctcacctgcactgtctctggtggctccatcagcagtggtggttactactggagctggatccgccagcacccagggaagggcctggagtggattgggtacatctattacagtgggagcccctactacaacccgtccctcaagagtcgaattaccatatcaatagacacgtctaagaaccagttctccctgaagctgaactctgtgactgccgcggacacggccgtgtattactgtgcgagatcgaattgtagtagtgccaactgctatacggtggggttctactactacggtttggacgtctggggccgagggaccacggtcaccgtctcctca

SEQ ID NO: 31424 - protein, 130 aa, synthetic construct
  REGION 1..130: note = Description of Artificial Sequence: Synthetic polypeptide
QVQLQESGPGLVKPSQTLSLTCTVSGGSISSGGYYWSWIRQHPGKGLEWIGYIYYSGSPYYNPSLKSRITISIDTSKNQFSLKLNSVTAADTAVYYCARSNCSSANCYTVGFYYYGLDVWGRGTTVTVSS

SEQ ID NO: 31425 - DNA, 390 bp, synthetic construct
  misc_feature 1..390: note = Description of Artificial Sequence: Synthetic polynucleotide
  source 1..390: mol_type = other DNA
caggtgcagctgcaggagtcgggcccaggactggtgaagccttcacagaccctgtccctcacctgcactgtctctggtggctccatcagcagtggtggttactactggagctggatccgccagcacccagggaagggcctggagtggattgggtacatctattacagtgggagcccctactacaatccgtccctcaagagtcgaattaccatatcaatagacacgtctaagaaccagttctccctgaagctgaactctgtgactgccgcggacacggccgtgtattactgtgcgagatcgaattgtagtagtgccaactgctatacggtggggttctactactacggtatggacgtctggggccaagggaccacggtcaccgtctcctca

SEQ ID NO: 31426 - protein, 130 aa, synthetic construct
  REGION 1..130: note = Description of Artificial Sequence: Synthetic polypeptide
QVQLQESGPGLVKPSQTLSLTCTVSGGSISSGGYYWSWIRQHPGKGLEWIGYIYYSGSPYYNPSLKSRITISIDTSKNQFSLKLNSVTAADTAVYYCARSNCSSANCYTVGFYYYGMDVWGQGTTVTVSS

SEQ ID NO: 31427 - DNA, 390 bp, synthetic construct
  misc_feature 1..390: note = Description of Artificial Sequence: Synthetic polynucleotide
  source 1..390: mol_type = other DNA
caggtgcagctggtggagtctgggggaggcgtggtccagcctgggaggtccctgagactctcctgtgcagcgtctggattcaccttcaatggctatggcatgcactgggtccgccaggctccaggcaaggggctggagtgggtggcagttatatggtatgatggaagtaataaatactatgcagactccgtgaagggccgattcaccatctccagagacacttccaagaacacgctgtttctgcaaatgaacagcctgacagccgaggacacggctgtgtattactgtgcgagagatgatagatattgtagtagtcccacctgccatccttactactactactacggtctggacgtctggggccaagggaccacggtcaccgtctcctca

SEQ ID NO: 31428 - protein, 130 aa, synthetic construct
  REGION 1..130: note = Description of Artificial Sequence: Synthetic polypeptide
QVQLVESGGGVVQPGRSLRLSCAASGFTFNGYGMHWVRQAPGKGLEWVAVIWYDGSNKYYADSVKGRFTISRDTSKNTLFLQMNSLTAEDTAVYYCARDDRYCSSPTCHPYYYYYGLDVWGQGTTVTVSS

SEQ ID NO: 31429 - DNA, 387 bp, synthetic construct
  misc_feature 1..387: note = Description of Artificial Sequence: Synthetic polynucleotide
  source 1..387: mol_type = other DNA
caggtgcagttggtggagtctgggggaggcgtggtccagcctgggaggtccctgagactctcctgtgcagcgtctggattcactttgagtagcaatggcatgcactgggtccgccaggctccaggcaaggggctggagtgggtggcagttatatggtatgatggaagtaataaatactatgcagactccgtgaagggccgattcaccatctccagagacacttccaagaacacgctgtatctgcaaatgaacagcctgagagccgaggacacggctgtgtattactgtgcgagagatcagtacaaccggaacgacggaccaccagcttactactactactacggtttggacgtctggggccaagggaccacggtcaccgtctcctca

SEQ ID NO: 31430 - protein, 129 aa, synthetic construct
  REGION 1..129: note = Description of Artificial Sequence: Synthetic polypeptide
QVQLVESGGGVVQPGRSLRLSCAASGFTLSSNGMHWVRQAPGKGLEWVAVIWYDGSNKYYADSVKGRFTISRDTSKNTLYLQMNSLRAEDTAVYYCARDQYNRNDGPPAYYYYYGLDVWGQGTTVTVSS

SEQ ID NO: 31431 - DNA, 387 bp, synthetic construct
  misc_feature 1..387: note = Description of Artificial Sequence: Synthetic polynucleotide
  source 1..387: mol_type = other DNA
caggtgcagctggtggagtctgggggaggcgtggtccagcctgggaggtccctgagactctcctgtgcagcgtctggattcactttgagcagcaatggcatgcactgggtccgccaggctccaggcaaggggctggagtgggtggcagttatatggtatgatggaagtaataaatactatgcagactccgtgaagggccgattcaccatctccagagacaattccaagaacacgctgtctctgcaaatgaacagcctgagagccgaggacacggctgtgtattactgtgcgagagatcagtacaaccggaacgacggaccaccagcttactactactactacggtatggacgtctggggccaagggaccacggtcaccgtctcctca

SEQ ID NO: 31432 - protein, 129 aa, synthetic construct
  REGION 1..129: note = Description of Artificial Sequence: Synthetic polypeptide
QVQLVESGGGVVQPGRSLRLSCAASGFTLSSNGMHWVRQAPGKGLEWVAVIWYDGSNKYYADSVKGRFTISRDNSKNTLSLQMNSLRAEDTAVYYCARDQYNRNDGPPAYYYYYGMDVWGQGTTVTVSS

SEQ ID NO: 31433 - DNA, 369 bp, synthetic construct
  misc_feature 1..369: note = Description of Artificial Sequence: Synthetic polynucleotide
  source 1..369: mol_type = other DNA
gaggtgcagctggtggagtctgggggaggcttggtacagcctggggggtccctgagactctcctgtgcagcctctggattcaccttcagtagctatagcttgaactgggtccgccaggctccagggaaggggctggagtgggtttcatacattggtagtagtggcagtatcatattctacgcagactctgtgaagggccgattcaccatctccagagacaatgccaagaactcactgtatctgcaaatgaacagcctgagagacgaggacacggctgtgtattactgtgcgagaggggatacagctggggttacctattactacggtatggacgtctggggccaagggaccacggtcaccgtctcctca

SEQ ID NO: 31434 - protein, 123 aa, synthetic construct
  REGION 1..123: note = Description of Artificial Sequence: Synthetic polypeptide
EVQLVESGGGLVQPGGSLRLSCAASGFTFSSYSLNWVRQAPGKGLEWVSYIGSSGSIIFYADSVKGRFTISRDNAKNSLYLQMNSLRDEDTAVYYCARGDTAGVTYYYGMDVWGQGTTVTVSS

SEQ ID NO: 31435 - DNA, 393 bp, synthetic construct
  misc_feature 1..393: note = Description of Artificial Sequence: Synthetic polynucleotide
  source 1..393: mol_type = other DNA
caggtgcagctggtggagtctgggggaggcgtggtccagcctgggaggtccctgagactctcctgtgcagcgtctggattcaccttcagtagctatggcatgcactgggtccgccaggctccaggcaaggggctggagtgggtggcaattatatggtatgatggaagtaataaatactatgcagactccgtgaagggccgattcaccatctccagagacaattccaagaacacgctgtatctgcaaatgaacagcctgagagccgaggacacgggtgtgtattactgtgcgagagagggggctacgtattaccatggttcggggagttattatccggctactaactacggtatggacgtctggggccaagggaccacggtcaccgtctcctca

SEQ ID NO: 31436 - protein, 131 aa, synthetic construct
  REGION 1..131: note = Description of Artificial Sequence: Synthetic polypeptide
QVQLVESGGGVVQPGRSLRLSCAASGFTFSSYGMHWVRQAPGKGLEWVAIIWYDGSNKYYADSVKGRFTISRDNSKNTLYLQMNSLRAEDTGVYYCAREGATYYHGSGSYYPATNYGMDVWGQGTTVTVSS

SEQ ID NO: 31437 - DNA, 366 bp, synthetic construct
  misc_feature 1..366: note = Description of Artificial Sequence: Synthetic polynucleotide
  source 1..366: mol_type = other DNA
caggtgcagctggtggagtctgggggaggcgtggtccagcctgggaggtccctgagactctcctgtgcagcgtctggattcaccttcagtagctatggcatgcactgggtccgccaggctccaggcaaggggctggagtgggtggcagttatatggtatgatggaagtaataaatattatgcagactccgtgaagggccgattcaccatctccagagacaattccaagaacacgctgtatctgcaaatgaacagcctgagagccgaggacacggctgtgtattactgtgcgagtcccctttacgatatgggactctactacgatatggacgtctggggccaagggaccacggtcaccgtctcctca

SEQ ID NO: 31438 - protein, 122 aa, synthetic construct
  REGION 1..122: note = Description of Artificial Sequence: Synthetic polypeptide
QVQLVESGGGVVQPGRSLRLSCAASGFTFSSYGMHWVRQAPGKGLEWVAVIWYDGSNKYYADSVKGRFTISRDNSKNTLYLQMNSLRAEDTAVYYCASPLYDMGLYYDMDVWGQGTTVTVSS

SEQ ID NO: 31439 - DNA, 390 bp, synthetic construct
  misc_feature 1..390: note = Description of Artificial Sequence: Synthetic polynucleotide
  source 1..390: mol_type = other DNA
caggtgcagctggtggagtctgggggaggcgtggtccagcctgggaggtccctgagactctcctgtgcagcgtctggattcaccttcagtggctatggcatgaactgggtccgccaggctccaggcaaggggctggagtgggtggcaattatatggtatgatggaaataataaatactatgcagactccgtgaagggccgattcaccatctccagagacaattccaagaacacgctgtatctgcaaatgaacagcctgagagccgaggacacggctgtgtattactgtgcgagagatcgggtttattgtagtagtaccagctgccatccctattactactactacgctatggacgtctggggccaagggaccacggtcaccgtctcctca

SEQ ID NO: 31440 - protein, 130 aa, synthetic construct
  REGION 1..130: note = Description of Artificial Sequence: Synthetic polypeptide
QVQLVESGGGVVQPGRSLRLSCAASGFTFSGYGMNWVRQAPGKGLEWVAIIWYDGNNKYYADSVKGRFTISRDNSKNTLYLQMNSLRAEDTAVYYCARDRVYCSSTSCHPYYYYYAMDVWGQGTTVTVSS

SEQ ID NO: 31441 - DNA, 387 bp, synthetic construct
  misc_feature 1..387: note = Description of Artificial Sequence: Synthetic polynucleotide
  source 1..387: mol_type = other DNA
caggtgcagctggtggagtctgggggaggcgtggtccagcctgggaggtccctgagactctcctgtgcagcgtctggactcaccttcagtaactgtggcatgcactgggtccgccaggctccaggcaaggggctggagtgggtggcaattatatggtatgatggaagtaataaatactatgcagactccgtgaagggccgattcaccatctccagagacaattccaagaacacgctggatctgcaaatgaacagcctgagagccgaggacacggctgtgtattactgtgcgagagatcagtacaacaggaacgacggaccaccagcttactactactactacggtttggacgtctggggccaagggaccacggtcaccgtctcctca

SEQ ID NO: 31442 - protein, 129 aa, synthetic construct
  REGION 1..129: note = Description of Artificial Sequence: Synthetic polypeptide
QVQLVESGGGVVQPGRSLRLSCAASGLTFSNCGMHWVRQAPGKGLEWVAIIWYDGSNKYYADSVKGRFTISRDNSKNTLDLQMNSLRAEDTAVYYCARDQYNRNDGPPAYYYYYGLDVWGQGTTVTVSS

SEQ ID NO: 31443 - DNA, 369 bp, synthetic construct; identical to SEQ ID NO: 31433
  misc_feature 1..369: note = Description of Artificial Sequence: Synthetic polynucleotide
  source 1..369: mol_type = other DNA

SEQ ID NO: 31444 - protein, 123 aa, synthetic construct; identical to SEQ ID NO: 31434
  REGION 1..123: note = Description of Artificial Sequence: Synthetic polypeptide

SEQ ID NO: 31445 - DNA, 345 bp, synthetic construct
  misc_feature 1..345: note = Description of Artificial Sequence: Synthetic polynucleotide
  source 1..345: mol_type = other DNA
caggtgcagctggtgcagtctggggctgaggtgaagaagcctggggcctcagtgaaggtttcctgcaaggcatctggatacaccttcaacagttactatatgtattgggtgcgacaggcccctggacaagggcttgagtggatgggaataatcaaccctagtggtggtagcacaaactacgcacagaagttccagggcagagtcaccatgaccagggacacgtccacgagcacactctacatggagctgaacagcctgagatctgaggacacggccgtgtattactgtgcgagtggttgggagttaaactactggggccagggaaccctggtcaccgtctcctca

SEQ ID NO: 31446 - protein, 115 aa, synthetic construct
  REGION 1..115: note = Description of Artificial Sequence: Synthetic polypeptide
QVQLVQSGAEVKKPGASVKVSCKASGYTFNSYYMYWVRQAPGQGLEWMGIINPSGGSTNYAQKFQGRVTMTRDTSTSTLYMELNSLRSEDTAVYYCASGWELNYWGQGTLVTVSS

SEQ ID NO: 31447 - DNA, 390 bp, synthetic construct
  misc_feature 1..390: note = Description of Artificial Sequence: Synthetic polynucleotide
  source 1..390: mol_type = other DNA
caggtgcagctggtggagtctgggggaggcgtggtccagcctgggaggtccctgagactctcctgtgcagcgtctggattcaccttcagtagttatggcatgcactgggtccgccaggctccaggcaaggggctggagtgggtggcagttatatggaatgatggaggtaataaatataatggagactccgtgaagggccgattcaccatctccagagacaattccaagaacacgctgtatctgcaaatgaacagtctgagagccgaggacacggctgtgtattactgtgcgagagaccgtacgtattactctggttcggggagccccccctactactactactacggtatggacgtctggggccaagggaccacggtcaccgtctcctca

SEQ ID NO: 31448 - protein, 130 aa, synthetic construct
  REGION 1..130: note = Description of Artificial Sequence: Synthetic polypeptide
QVQLVESGGGVVQPGRSLRLSCAASGFTFSSYGMHWVRQAPGKGLEWVAVIWNDGGNKYNGDSVKGRFTISRDNSKNTLYLQMNSLRAEDTAVYYCARDRTYYSGSGSPPYYYYYGMDVWGQGTTVTVSS

SEQ ID NO: 31449 - DNA, 345 bp, synthetic construct
  misc_feature 1..345: note = Description of Artificial Sequence: Synthetic polynucleotide
  source 1..345: mol_type = other DNA
caggtgcagctggtgcagtctggggctgaggtgaagaagcctggggcctcagtgaaggtttcctgcaaggcatctggatacaccttcagaagttactatatgtattgggtgcgacaggcccctggacaagggcttgagtgggtgggaacaatcaaccctagtggtggtagcacaaactacgcacagaagttccagggcagagtcaccatgaccagggacacgtccacgagcacactctacatggagctgaacagcctgagatctgaggacacggccgtgtattactgtgcgagtggctgggagttaaactactggggccagggaaccctggtcaccgtctcctca

SEQ ID NO: 31450 - protein, 115 aa, synthetic construct
  REGION 1..115: note = Description of Artificial Sequence: Synthetic polypeptide
QVQLVQSGAEVKKPGASVKVSCKASGYTFRSYYMYWVRQAPGQGLEWVGTINPSGGSTNYAQKFQGRVTMTRDTSTSTLYMELNSLRSEDTAVYYCASGWELNYWGQGTLVTVSS

SEQ ID NO: 31451 - DNA, 345 bp, synthetic construct
  misc_feature 1..345: note = Description of Artificial Sequence: Synthetic polynucleotide
  source 1..345: mol_type = other DNA
caggtgcagctggtgcagtctggggctgaggtgaagaagcctggggcctcagtgacggtttcctgcaaggcatctggatacaccttcagaagttactatatgtattgggtgcgacaggcccctggacaagggcttgagtgggtgggaacaatcaaccctagtggtggtagcacagactacgcacagaagttccagggcagagtcaccatgaccagggacacgtccacgagcacactctacatggagctgaacagcctgagatctgaggacacggccgtgtattactgtgcgagtggctgggaattaaactactggggccagggaaccctggtcaccgtctcctca

SEQ ID NO: 31452 - protein, 115 aa, synthetic construct
  REGION 1..115: note = Description of Artificial Sequence: Synthetic polypeptide
QVQLVQSGAEVKKPGASVTVSCKASGYTFRSYYMYWVRQAPGQGLEWVGTINPSGGSTDYAQKFQGRVTMTRDTSTSTLYMELNSLRSEDTAVYYCASGWELNYWGQGTLVTVSS

SEQ ID NO: 31453 - DNA, 369 bp, synthetic construct
  misc_feature 1..369: note = Description of Artificial Sequence: Synthetic polynucleotide
  source 1..369: mol_type = other DNA
caggtgcagctggtggagtctgggggaggcgtggtccagcctgggaggtccctgagactctcctgtgcagcctctggattcaccttcagtagctatggcatgcactgggtccgccaggctccaggcaaggggctggaatgggtggcagttatatcatatgatggaagtcctaaatactgtgcagactccgtgaagggccgattcaccatctccagagacaattccaagaacacgctgtttctccaaatgaacagcctgagagctgaggacacggctgtgtattattgtgcgagagatgaaaggcagtggctgccggccccctacggtatggacgtctggggccaagggaccacggtcaccgtctcctca

SEQ ID NO: 31454 - protein, 123 aa, synthetic construct
  REGION 1..123: note = Description of Artificial Sequence: Synthetic polypeptide
QVQLVESGGGVVQPGRSLRLSCAASGFTFSSYGMHWVRQAPGKGLEWVAVISYDGSPKYCADSVKGRFTISRDNSKNTLFLQMNSLRAEDTAVYYCARDERQWLPAPYGMDVWGQGTTVTVSS

SEQ ID NO: 31455 - DNA, 384 bp, synthetic construct
  misc_feature 1..384: note = Description of Artificial Sequence: Synthetic polynucleotide
  source 1..384: mol_type = other DNA
caggtacagctgcagcagtcaggtccaggactggtgaagccctcgcagaccctctcactcacctgtgccatctccggggacagtgtctctagcaacagtgctgcttggaactggatcaggcagtccccatcgagaggccttgagtggctgggaaggacatactacaggtccaagtggtataatgcttatccagtatctatggaaagtcgaatatccatcaacccagacacatccaagaaccagttctccctgcagctgaactctgtgactcccgaggacacggctgtttattactgtgcaagagataaggcagctgggaggaatgacttctactactacggtatggacgtctggggccaagggaccacggtcaccgtctcctca

SEQ ID NO: 31456 - protein, 128 aa, synthetic construct
  REGION 1..128: note = Description of Artificial Sequence: Synthetic polypeptide
QVQLQQSGPGLVKPSQTLSLTCAISGDSVSSNSAAWNWIRQSPSRGLEWLGRTYYRSKWYNAYPVSMESRISINPDTSKNQFSLQLNSVTPEDTAVYYCARDKAAGRNDFYYYGMDVWGQGTTVTVSS

SEQ ID NO: 31457 - DNA, 387 bp, synthetic construct
  misc_feature 1..387: note = Description of Artificial Sequence: Synthetic polynucleotide
  source 1..387: mol_type = other DNA
caggtgcagctggtggagtctgggggaggcgtggtccagcctgggaggtccctgagactctcctgtgcagcgtctggactcaccttcagtaactgtggcatgcactgggtccgccaggctccaggcaaggggctggagtgggtggcaattatatggtatgatggaagtaataaatactatgcagactccgtgaagggccgattcaccgtctccagagacaattccaagaacacgctggatctgcaaatgaacagcctgagagccgaggacacggctgtgtattactgtgcgagagatcagtacaacaggaacgacggaccaccagcttactactactactacggtttggacgtctggggccaagggaccacggtcaccgtctcctca

SEQ ID NO: 31458 - protein, 129 aa, synthetic construct
  REGION 1..129: note = Description of Artificial Sequence: Synthetic polypeptide
QVQLVESGGGVVQPGRSLRLSCAASGLTFSNCGMHWVRQAPGKGLEWVAIIWYDGSNKYYADSVKGRFTVSRDNSKNTLDLQMNSLRAEDTAVYYCARDQYNRNDGPPAYYYYYGLDVWGQGTTVTVSS

SEQ ID NO: 31459 - DNA, 384 bp, synthetic construct
  misc_feature 1..384: note = Description of Artificial Sequence: Synthetic polynucleotide
  source 1..384: mol_type = other DNA
caggtacagctgcagcagtcaggtccaggactggtgaagccctcgcagaccctctcactcacctgtgccatctccggggacagtgtctctagcaacagtgctgcttggaactggatcaggcagtccccatcgagaggccttgagtggctgggaaggacatactacaggtccaagtggtatagtgcttatccagtatctatggaaagtcgagtatccatcaacccagacacatccaagaaccagttctccctgcagctgaactctgtgactcccgaggacacggctgtttattactgtgcaagagataaggcagctgggaggaatgacttctactactacggtatggacgtctggggccaagggaccacggtcaccgtctcctca

SEQ ID NO: 31460 - protein, 128 aa, synthetic construct
  REGION 1..128: note = Description of Artificial Sequence: Synthetic polypeptide
QVQLQQSGPGLVKPSQTLSLTCAISGDSVSSNSAAWNWIRQSPSRGLEWLGRTYYRSKWYSAYPVSMESRVSINPDTSKNQFSLQLNSVTPEDTAVYYCARDKAAGRNDFYYYGMDVWGQGTTVTVSS

SEQ ID NO: 31461 - DNA, 360 bp, synthetic construct
  misc_feature 1..360: note = Description of Artificial Sequence: Synthetic polynucleotide
  source 1..360: mol_type = other DNA
caggtgcagttggtggagtctgggggaggcgtggtccagcctgggaggtccctgagactctcctgtgcagcgtctggattcaccttcagtagctatggcatgcactgggtccgccaggctccaggcaaggggctggagtgggtggcagttatatggtatgatggaagtaatgaatactatgcagactccgtgaagggccgattcaccatctccagagacaattccaagaacacgctgtatctgcaaatgaacagcctgagagccgaggacacggctgtgtattactgtgcgagagatatccggaactactactacggtttggacgtctggggccaagggaccacggtcaccgtctcctca

SEQ ID NO: 31462 - protein, 120 aa, synthetic construct
  REGION 1..120: note = Description of Artificial Sequence: Synthetic polypeptide
QVQLVESGGGVVQPGRSLRLSCAASGFTFSSYGMHWVRQAPGKGLEWVAVIWYDGSNEYYADSVKGRFTISRDNSKNTLYLQMNSLRAEDTAVYYCARDIRNYYYGLDVWGQGTTVTVSS

SEQ ID NO: 31463 - DNA, 381 bp, synthetic construct
  misc_feature 1..381: note = Description of Artificial Sequence: Synthetic polynucleotide
  source 1..381: mol_type = other DNA
caggcgcagctggtggagtctgggggaggcgtggtccagcctgggaggtccctgagactctcctgtgcagcgtctggattcaccttcagtaactctggcatgcactgggtccgccagggtccaggcaaggggctggagtgggtggcgattatatattatgatggaagttataaatacaatgcagactccgtgaagggccgattcaccatctccagagacaattccaagaacacgctgtatctgcaaatgaacagcctgagagccgaggacacggctgtatattactgtgcgagagaccgtcattacgatttccacgttccctactattactattacggtatggacgtctggggccaagggaccacggtcaccgtctcctca

SEQ ID NO: 31464 - protein, 127 aa, synthetic construct
  REGION 1..127: note = Description of Artificial Sequence: Synthetic polypeptide
QAQLVESGGGVVQPGRSLRLSCAASGFTFSNSGMHWVRQGPGKGLEWVAIIYYDGSYKYNADSVKGRFTISRDNSKNTLYLQMNSLRAEDTAVYYCARDRHYDFHVPYYYYYGMDVWGQGTTVTVSS

SEQ ID NO: 31465 - DNA, 363 bp, synthetic construct
  misc_feature 1..363: note = Description of Artificial Sequence: Synthetic polynucleotide
  source 1..363: mol_type = other DNA
gaggtgcagctggtggagtctgggggaggcttggtacagcctggggggtccctgagattctcctgtgcagcctctggattcaccttcagtagctatagcatgaactgggtccgccaggctccagggaaggggctggagtgggttgcatacattagtagtagtggaagtaccacatactacgcagactctgtgcagggccgattcaccatctccagagacaatgccaagaactcactgtatctgcaaatgaacagcctgagagacgaggacacggctgtgtatcgctgtgcgagagatagtaggaaggggttctactacggtctggacgtctggggccaagggatcacggtcaccgtctcctca

SEQ ID NO: 31466 - protein, 121 aa, synthetic construct
  REGION 1..121: note = Description of Artificial Sequence: Synthetic polypeptide
EVQLVESGGGLVQPGGSLRFSCAASGFTFSSYSMNWVRQAPGKGLEWVAYISSSGSTTYYADSVQGRFTISRDNAKNSLYLQMNSLRDEDTAVYRCARDSRKGFYYGLDVWGQGITVTVSS

SEQ ID NO: 31467 - DNA, 369 bp, synthetic construct
  misc_feature 1..369: note = Description of Artificial Sequence: Synthetic polynucleotide
  source 1..369: mol_type = other DNA
caggtgcagctggtggagtctgggggaggcgtggtccagcctgggaggtccctgagactctcctgtgcagcgtctggattcaccttcagtaactttggcatgcactgggtccgccaggctccaggcaaggggctggagtgggtggcaattatatggtatgatggaagtgataaatactatgcagactccgtgaagggccgattcaccatctccagagacaattccaagaacacgctgtatctgcaaatgaacaccctgagagccgaagacacggctgtgtatttctgtgcgagaggggggcccccgttctctacggtgactatgtactttgactactggggccagggaaccctggtcaccgtctcctca

SEQ ID NO: 31468 - protein, 123 aa, synthetic construct
  REGION 1..123: note = Description of Artificial Sequence: Synthetic polypeptide
QVQLVESGGGVVQPGRSLRLSCAASGFTFSNFGMHWVRQAPGKGLEWVAIIWYDGSDKYYADSVKGRFTISRDNSKNTLYLQMNTLRAEDTAVYFCARGGPPFSTVTMYFDYWGQGTLVTVSS

SEQ ID NO: 31469 - DNA, 357 bp, synthetic construct
  misc_feature 1..357: note = Description of Artificial Sequence: Synthetic polynucleotide
  source 1..357: mol_type = other DNA
cagatcaccttgaaggagtctggtcctacgctggtgaaacccacacagaccctcacgctgacctgcaccttctctgggttctcactcagcactagtggagtgggtgtgggctggatccgtcagcccccaggaaaggccctggagtggcttggattcatttcttggaatgatgataagcgctacagcccatctctgaagagcagcctcaccatcaccaaggacacctccaaaaaccaggtggttcttataatgaccaacatggaccctgtggacacagccacatattactgtgcacacaaagcagcagctgttgcttttgatatctggggccaagggacaatggtcaccgtctcttca

SEQ ID NO: 31470 - protein, 119 aa, synthetic construct
  REGION 1..119: note = Description of Artificial Sequence: Synthetic polypeptide
QITLKESGPTLVKPTQTLTLTCTFSGFSLSTSGVGVGWIRQPPGKALEWLGFISWNDDKRYSPSLKSSLTITKDTSKNQVVLIMTNMDPVDTATYYCAHKAAAVAFDIWGQGTMVTVSS

SEQ ID NO: 31471 - DNA, 390 bp, synthetic construct
  misc_feature 1..390: note = Description of Artificial Sequence: Synthetic polynucleotide
  source 1..390: mol_type = other DNA
caggtgcagctggtgcagtctggggctgaggtgaagaagcctggggcctcagtgaaggtctcctgcaaggcttctggatacaccttcaccagttatgatatcaactgggtgcgacaggccactggacaagggcttgagtggatgggatggatgaaccctaacagtggtaacacaggctatgcacagaagttccagggcagagtcaccatgaccaggaacacctccataagcacagcctacatggagctgagcagcctgagatctgaggacacggccgtgtattactgtgcgagagggttttattactatggttcggggagtcatgtcccttaccactactactacggtttggacgtctggggccaagggaccacggtcaccgtctcctca

SEQ ID NO: 31472 - protein, 130 aa, synthetic construct
  REGION 1..130: note = Description of Artificial Sequence: Synthetic polypeptide
QVQLVQSGAEVKKPGASVKVSCKASGYTFTSYDINWVRQATGQGLEWMGWMNPNSGNTGYAQKFQGRVTMTRNTSISTAYMELSSLRSEDTAVYYCARGFYYYGSGSHVPYHYYYGLDVWGQGTTVTVSS

SEQ ID NO: 31473 - DNA, 369 bp, synthetic construct
  misc_feature 1..369: note = Description of Artificial Sequence: Synthetic polynucleotide
  source 1..369: mol_type = other DNA
caggtgcagctggtggagtctgggggaggcgtggtccagcctgggaggtccctgagactctcctgtgcagcgtctggattcaccttcagtaactatggcatgcactgggtccgccaggctccaggcaaggggctggagtgggtggcaattatatggtatgatggaagtgataaatactatgcagactccgtgaagggccgaatcaccatctccagagacaattccaagaacacgctgtatctgcaaatgaacaccctgagagccgaagacacggctgtgtatttctgtgcgagaggggggcccccgttttctacggtgactatgtacttcgactactggggccagggaaccctggtcaccgtctcctca

SEQ ID NO: 31474 - protein, 123 aa, synthetic construct
  REGION 1..123: note = Description of Artificial Sequence: Synthetic polypeptide
QVQLVESGGGVVQPGRSLRLSCAASGFTFSNYGMHWVRQAPGKGLEWVAIIWYDGSDKYYADSVKGRITISRDNSKNTLYLQMNTLRAEDTAVYFCARGGPPFSTVTMYFDYWGQGTLVTVSS

SEQ ID NO: 31475 - DNA, 366 bp, synthetic construct
  misc_feature 1..366: note = Description of Artificial Sequence: Synthetic polynucleotide
  source 1..366: mol_type = other DNA
caggttcagctggtgcagtctggagctgaggtgaagaagcctggggcctcagtgaaggtctcctgcaaggcttctggttacacctttaacagctatggtatcagctgggtgcgacaggcccctggacaagggcttgagtggatgggatggatcagcgcttataatggtaacacaaagtatgcacagaagctccagggcagagtcaccatgaccacagacacatccacgagcacagcctacatggagctgaggagcctgagatctgacgacacggccgtgtattactgtgcgagacacgatttttggagtggttattataagggtatggacgtctggggccaagggaccacggtcaccgtctcctca

SEQ ID NO: 31476 - protein, 122 aa, synthetic construct
  REGION 1..122: note = Description of Artificial Sequence: Synthetic polypeptide
QVQLVQSGAEVKKPGASVKVSCKASGYTFNSYGISWVRQAPGQGLEWMGWISAYNGNTKYAQKLQGRVTMTTDTSTSTAYMELRSLRSDDTAVYYCARHDFWSGYYKGMDVWGQGTTVTVSS

SEQ ID NO: 31477 - DNA, 378 bp, synthetic construct
  misc_feature 1..378: note = Description of Artificial Sequence: Synthetic polynucleotide
  source 1..378: mol_type = other DNA
caggtacagctgcagcagtcaggtccaggactggtgaagccctcgcagaccctctcactcacctgtgccatctccggggacagtgtctctagtaacagtgctgcttggaactggatcaggcagtccccatcgagaggccttgagtggctgggaaggacatactacaggtccaagtggtataatgattatgcagtatctgtgaaaagtcgaataaccttcaacccggacacatccaagaaccagttctccctgcggctgaactctgtgactcccgaggacacggctgtgtattactgtgcaagagaccgctataactggaactacccctactggtacttcgatctctggggccgtggcaccctggtcactgtctcctca

SEQ ID NO: 31478 - protein, 126 aa, synthetic construct
  REGION 1..126: note = Description of Artificial Sequence: Synthetic polypeptide
QVQLQQSGPGLVKPSQTLSLTCAISGDSVSSNSAAWNWIRQSPSRGLEWLGRTYYRSKWYNDYAVSVKSRITFNPDTSKNQFSLRLNSVTPEDTAVYYCARDRYNWNYPYWYFDLWGRGTLVTVSS

SEQ ID NO: 31479 - DNA, 366 bp, synthetic construct
  misc_feature 1..366: note = Description of Artificial Sequence: Synthetic polynucleotide
  source 1..366: mol_type = other DNA
caggttcagctggtgcagtctggagctgaggtgaagaagcctggggcctcagtgaaggtctcctgcaaggcttctggttacacctttaacagctatggtgtcagctgggtgcgacaggcccctggacaagggcttgagtggatgggatggatcagcgcttataatggtaacagaaagtatgcacagaagctccagggcagagtctccatgaccacagacacatccacgagcacagcctacatggagctgaggagcctgagatctgacgacacggccgtgtattactgtgcgagacacgatttttggagtggttattataagggtatggacgtctggggccaagggaccacggtcaccgtctcctca

SEQ ID NO: 31480 - protein, 122 aa, synthetic construct
  REGION 1..122: note = Description of Artificial Sequence: Synthetic polypeptide
QVQLVQSGAEVKKPGASVKVSCKASGYTFNSYGVSWVRQAPGQGLEWMGWISAYNGNRKYAQKLQGRVSMTTDTSTSTAYMELRSLRSDDTAVYYCARHDFWSGYYKGMDVWGQGTTVTVSS

SEQ ID NO: 31481 - DNA, 390 bp, synthetic construct
  misc_feature 1..390: note = Description of Artificial Sequence: Synthetic polynucleotide
  source 1..390: mol_type = other DNA
caggtgcagctggtggagtctgggggaggcgtggtccagcccgggaggtccctgagactctcctgtgcagcgtctggattcaccttcagtggctatggcatgcactgggtccgccaggctccaggcaaggggctggagtgggtggcagttatatggtatgatggaagtaataaatactatgcagactccgtgaagggccgattcaccatctccagagacaattccaagaacacgctgtatctgcaaatgaacagcctgagagccgaggacacggctgtttattactgtgcgagagatcgggtctattgtagtagttccagctgctcatattactactactactacggtatggacgtctggggccaagggaccacggtcaccgtctcctca

SEQ ID NO: 31482 - protein, 130 aa, synthetic construct
  REGION 1..130: note = Description of Artificial Sequence: Synthetic polypeptide
QVQLVESGGGVVQPGRSLRLSCAASGFTFSGYGMHWVRQAPGKGLEWVAVIWYDGSNKYYADSVKGRFTISRDNSKNTLYLQMNSLRAEDTAVYYCARDRVYCSSSSCSYYYYYYGMDVWGQGTTVTVSS

SEQ ID NO: 31483 - DNA, 357 bp, synthetic construct
  misc_feature 1..357: note = Description of Artificial Sequence: Synthetic polynucleotide
  source 1..357: mol_type = other DNA
caggtgcagctggtggagtctgggggaggcgtggtccagcctgggaggtccctgagactctcctgtgcagcgtctggattcaccttcagtcactttggcatgcactgggtccgccaggctccaggcaaggggctgaaatgggtggcagttatttggtatgatggaagtaataaatactatgcagactccgtgaagggccgattcaccatctccagagacaattccaagaacacgctgtatctgcaaatgaacagcctgagagccgaggacacggctgtgtattactgtgcgagaggggactggaactacgagggttttgactactggggccagggaaccctggtcaccgtctcctca

SEQ ID NO: 31484 - protein, 119 aa, synthetic construct
  REGION 1..119: note = Description of Artificial Sequence: Synthetic polypeptide
QVQLVESGGGVVQPGRSLRLSCAASGFTFSHFGMHWVRQAPGKGLKWVAVIWYDGSNKYYADSVKGRFTISRDNSKNTLYLQMNSLRAEDTAVYYCARGDWNYEGFDYWGQGTLVTVSS

SEQ ID NO: 31485 - DNA, 366 bp, synthetic construct
  misc_feature 1..366: note = Description of Artificial Sequence: Synthetic polynucleotide
  source 1..366: mol_type = other DNA
caggtgcagctggtgcagtctggggctgaggtgaagaagcctggggcctcagtgaaggtctcctgcaaggcttctggaaacaccttcaccggctactatatgcactgggtgcgacaggcccctggacaagggcttgagtggatgggatggatcatccctaacagtggtgacacaaactatgcacagaagtttcagggcagggtcaccatgaccagggacacgtccatcagcacagcctacatggagctgagcaggctgagatctgacgacacggccgtctattactgtgcgagagatgggtatagcagtggctggttcaactggttcgacccctggggccagggaaccctggtcaccgtctcctca

SEQ ID NO: 31486 - protein, 122 aa, synthetic construct
  REGION 1..122: note = Description of Artificial Sequence: Synthetic polypeptide
QVQLVQSGAEVKKPGASVKVSCKASGNTFTGYYMHWVRQAPGQGLEWMGWIIPNSGDTNYAQKFQGRVTMTRDTSISTAYMELSRLRSDDTAVYYCARDGYSSGWFNWFDPWGQGTLVTVSS

SEQ ID NO: 31487 - DNA, 366 bp, synthetic construct
  misc_feature 1..366: note = Description of Artificial Sequence: Synthetic polynucleotide
  source 1..366: mol_type = other DNA
caggttcagctggtgcagtctggagctgaggtgaagaagcctggggcctcagtgaaggtctcctgcaaggcttctggttacacctttaacagctatggtatcagctgggtgcgactggcccctggacaagggcttgagtggatgggatggattagtgcttataatggtaacacaaagaatgcacagaagctccagggcagagtcaccatgaccacagacacatccacgagcacagcctacatggagctgaggagcctgagatctgacgacacggccgtttattactgtgcgagacacgatttttggagtggttattataagggtatggacgtctggggccaagggaccacggtcaccgtctcctca

SEQ ID NO: 31488 - protein, 122 aa, synthetic construct
  REGION 1..122: note = Description of Artificial Sequence: Synthetic polypeptide
QVQLVQSGAEVKKPGASVKVSCKASGYTFNSYGISWVRLAPGQGLEWMGWISAYNGNTKNAQKLQGRVTMTTDTSTSTAYMELRSLRSDDTAVYYCARHDFWSGYYKGMDVWGQGTTVTVSS

SEQ ID NO: 31489 - DNA, 366 bp, synthetic construct
  misc_feature 1..366: note = Description of Artificial Sequence: Synthetic polynucleotide
  source 1..366: mol_type = other DNA
caggttcagctggtgcagtctggagctgaggtgaagaagcctggggcctcagtgaaggtctcctgcaaggcttctggctacacctttaacagctatggtatcagctgggtgcgacaggcccctggacaagggcttgagtggatgggatggatcagcgcttataatggtaacacaaagtatgcacagaagttccagggcagagtcaccatgaccacagacacatccacgagcacagcctacatggagctgaggagcctgagatctgacgacacggccgtgtattactgtgcgagacacgatttttggagtggttattataagggtatggacgtctggggccaagggaccacggtcaccgtctcctca

SEQ ID NO: 31490 - protein, 122 aa, synthetic construct
  REGION 1..122: note = Description of Artificial Sequence: Synthetic polypeptide
QVQLVQSGAEVKKPGASVKVSCKASGYTFNSYGISWVRQAPGQGLEWMGWISAYNGNTKYAQKFQGRVTMTTDTSTSTAYMELRSLRSDDTAVYYCARHDFWSGYYKGMDVWGQGTTVTVSS

SEQ ID NO: 31491 - DNA, 366 bp, synthetic construct
  misc_feature 1..366: note = Description of Artificial Sequence: Synthetic polynucleotide
  source 1..366: mol_type = other DNA
caggttcaactggtgcagtctggagctgaggtgaagaagcctggggcctcagtgaaggtctcctgcaaggcttctggttacacctttaacagctatggtttcagctgggtgcgacaggcccctggacaagggcttgagtggatgggatggatcagcgcttataatggtaacacaaaggaagcacagaagttccagggcagagtcaccatgaccacagacacatccacgagcacagcctacatggagctgaggagcctgagagctgacgacacggccgtgtattactgtgcgagacacgatttttggagtggttattataagggtatggacgtctggggccaagggaccacggtcaccgtctcctca

SEQ ID NO: 31492 - protein, 122 aa, synthetic construct
  REGION 1..122: note = Description of Artificial Sequence: Synthetic polypeptide
QVQLVQSGAEVKKPGASVKVSCKASGYTFNSYGFSWVRQAPGQGLEWMGWISAYNGNTKEAQKFQGRVTMTTDTSTSTAYMELRSLRADDTAVYYCARHDFWSGYYKGMDVWGQGTTVTVSS

SEQ ID NO: 31493 - DNA, 354 bp, synthetic construct
  misc_feature 1..354: note = Description of Artificial Sequence: Synthetic polynucleotide
  source 1..354: mol_type = other DNA
cagatcaccttgaaggagtctggtcctacgctggtgaaacccacacagaccctcacgctgacctgcaccttctctgggttctcactcagtactagtggagtgggtgtgggctggatccgtcagcccccaggaaaggccctggagtggcttgcactcatttattggcatgaagataagcgctacagcccatctctgaagagcaggctcaccatcactgaggacacctccaaaaaccaggtggaccttacaatgaccaacatggcccctgtggacacagccacatattactgtgcacacgtcacaggtatagcagctccctactggggccagggaaccctggtcaccgtctcctca

SEQ ID NO: 31494 - protein, 118 aa, synthetic construct
  REGION 1..118: note = Description of Artificial Sequence: Synthetic polypeptide
QITLKESGPTLVKPTQTLTLTCTFSGFSLSTSGVGVGWIRQPPGKALEWLALIYWHEDKRYSPSLKSRLTITEDTSKNQVDLTMTNMAPVDTATYYCAHVTGIAAPYWGQGTLVTVSS

SEQ ID NO: 31495 - DNA, 354 bp, synthetic construct
  misc_feature 1..354: note = Description of Artificial Sequence: Synthetic polynucleotide
  source 1..354: mol_type = other DNA
cagatcaccttgaaggagtctggtcctatgctggtgaaacccacacagaccctcacgctgacctgcaccttctctgggttctcactcagcactagtggagtgggtgtgggctggatccgtcagcccccaggaaaggccctggagtggcttgcactcatttattggaatgatgataagcgctacagtccatctctgaagagcaggctcaccatcaccgaggacacctccaaaaaccaggtggtccttacaatgaccaacatggaccctgtggacacagccacatattactgtgcacatgcagtggctgtctcctttgactactggggccagggaaccctggtcaccgtctcctca

SEQ ID NO: 31496 - protein, 118 aa, synthetic construct
  REGION 1..118: note = Description of Artificial Sequence: Synthetic polypeptide
QITLKESGPMLVKPTQTLTLTCTFSGFSLSTSGVGVGWIRQPPGKALEWLALIYWNDDKRYSPSLKSRLTITEDTSKNQVVLTMTNMDPVDTATYYCAHAVAVSFDYWGQGTLVTVSS

SEQ ID NO: 31497 - DNA, 354 bp, synthetic construct
  misc_feature 1..354: note = Description of Artificial Sequence: Synthetic polynucleotide
  source 1..354: mol_type = other DNA
cagatcaccttgaaggagtctggtcctacgctggtgaaacccacacagaccctcacgctgacctgcaccttctctgggttctcactcactactagtggagtgggtgtgggctggatccgtcagcccccaggaaaggccctggagtggcttgcactcatttattggcatgaagataggcgctacagcccatctctgaagagcaggctcaccatcactgaggacacctccaaaaaccaggtggaccttacaatgaccaacatggcccctgtggacacagccacatattactgtgcacacgtcacaggtatagcagctccctactggggccagggaaccctggtcaccgtctcctca

SEQ ID NO: 31498 - protein, 118 aa, synthetic construct
  REGION 1..118: note = Description of Artificial Sequence: Synthetic polypeptide
QITLKESGPTLVKPTQTLTLTCTFSGFSLTTSGVGVGWIRQPPGKALEWLALIYWHEDRRYSPSLKSRLTITEDTSKNQVDLTMTNMAPVDTATYYCAHVTGIAAPYWGQGTLVTVSS

SEQ ID NO: 31499 - DNA, 354 bp, synthetic construct
  misc_feature 1..354: note = Description of Artificial Sequence: Synthetic polynucleotide
  source 1..354: mol_type = other DNA
cagatcaccttgaaggagtctggtcctacgctggtgaaacccacacagaccctcacgctgacctgcaccttctctgggttctcactcagcactagtggagtgggtgtgggctggatccgtcagcccccaggaaaggccctggagtggcttgcactcatttattgggatgatgataagcgctacagcccatctctgaagagcaggctcaccatcaccgaggacacctccaaaaaccaggtggtccttacaatgaccaacatggaccctgtggacacagccacatattactgtgcacaccttatagcagtggcctttgactcctggggccagggaaccctggtcaccgtctcctca

SEQ ID NO: 31500 - protein, 118 aa, synthetic construct
  REGION 1..118: note = Description of Artificial Sequence: Synthetic polypeptide
QITLKESGPTLVKPTQTLTLTCTFSGFSLSTSGVGVGWIRQPPGKALEWLALIYWDDDKRYSPSLKSRLTITEDTSKNQVVLTMTNMDPVDTATYYCAHLIAVAFDSWGQGTLVTVSS

SEQ ID NO: 31501 - DNA, 351 bp, synthetic construct
  misc_feature 1..351: note = Description of Artificial Sequence: Synthetic polynucleotide
  source 1..351: mol_type = other DNA
gaggtgcagttggtggagtctgggggaggcctggtcaagcctggggggtccctgagactctcctgtgcagcctctggattcaccttcaatagctatagcatgaactgggtccgccaggctccagggaaggggctggagtggatctcatccattagtagtagtagttattacttatactacgcagactcagtgaagggccgattcaccatctccagagacagcgccaagaattcactgtatctgcaaatgaacagcctgagagccgaggacacggctgtatattactgtgcgaggacctatagtgggagttttgactactggggccagggaaccctggtcaccgtctcctca

SEQ ID NO: 31502 - protein, 117 aa, synthetic construct
  REGION 1..117: note = Description of Artificial Sequence: Synthetic polypeptide
EVQLVESGGGLVKPGGSLRLSCAASGFTFNSYSMNWVRQAPGKGLEWISSISSSSYYLYYADSVKGRFTISRDSAKNSLYLQMNSLRAEDTAVYYCARTYSGSFDYWGQGTLVTVSS

SEQ ID NO: 31503 - DNA, 372 bp, synthetic construct
  misc_feature 1..372: note = Description of Artificial Sequence: Synthetic polynucleotide
  source 1..372: mol_type = other DNA
caggtgcagttggtggagtctgggggaggcgtggtccagcctgggaggtccctgagactctcctgtgcagcctctggattcaccttcagtttctatggcatgcactgggtccgccaggctccaggcaaggggctggagtgggtggcagttacatcatatgatggaagtgataaatactatgcagactccgtgaagggccgattctccatctccagagacaattccaagaacacgctgtatctgcaaatgagcagcctgagagctgaggacacggctatgtattactgtgcgagagatgactatggttcggggagtcccctatactacggtatggacgtctggggccaagggaccacggtcaccgtctcctca

SEQ ID NO: 31504 - protein, 124 aa, synthetic construct
  REGION 1..124: note = Description of Artificial Sequence: Synthetic polypeptide
QVQLVESGGGVVQPGRSLRLSCAASGFTFSFYGMHWVRQAPGKGLEWVAVTSYDGSDKYYADSVKGRFSISRDNSKNTLYLQMSSLRAEDTAMYYCARDDYGSGSPLYYGMDVWGQGTTVTVSS

SEQ ID NO: 31505 - DNA, 372 bp, synthetic construct
  misc_feature 1..372: note = Description of Artificial Sequence: Synthetic polynucleotide
  source 1..372: mol_type = other DNA
gaggtgcagctggtggagtctgggggaggcttggtccagcctggggggtccctgagactctcctgtgcagcctctggattcacctttagtagcttttggatgagctgggtccgccaggctccagggaaggggctggagtgggtggcccacataaagcaagatggaagtgagaaatactatgtggactctgtgaagggccgattcaccatctccagagacaacgccaagaactcactgtatctgcaaatgaacagcctgagagccgaggacacggctgtgtattactgtgcgagaggggacctcccatacagctcgggctactactacggtatggacgtctggggccaagggaccacggtcaccgtctcctca

SEQ ID NO: 31506 - protein, 124 aa, synthetic construct
  REGION 1..124: note = Description of Artificial Sequence: Synthetic polypeptide
EVQLVESGGGLVQPGGSLRLSCAASGFTFSSFWMSWVRQAPGKGLEWVAHIKQDGSEKYYVDSVKGRFTISRDNAKNSLYLQMNSLRAEDTAVYYCARGDLPYSSGYYYGMDVWGQGTTVTVSS

SEQ ID NO: 31507 - DNA, 393 bp, synthetic construct
  misc_feature 1..393: note = Description of Artificial Sequence: Synthetic polynucleotide
  source 1..393: mol_type = other DNA
caggtgcaactggtggagtctgggggaggcgtggtccagcctgggaggtccctgagactctcctgtgcagcctctggattcaccttcagtagctatggcatgcactgggtccgccaggctccaggcaaggggctggagtgggtggcagttatatcatatgatggaagtaataaatactatgcagactccgtgaagggccgattcaccatctccagagacaattccaagaacacgttgtatctgcaaatgaacagcctgagagctgaggacacggctgtgtattactgtgcgagagatgagggacgtggatatggtggctacgagaggggatattactactactactacggtatggacgtctggggccaagggaccacggtcaccgtctcctca

SEQ ID NO: 31508 - protein, 131 aa, synthetic construct
  REGION 1..131: note = Description of Artificial Sequence: Synthetic polypeptide
QVQLVESGGGVVQPGRSLRLSCAASGFTFSSYGMHWVRQAPGKGLEWVAVISYDGSNKYYADSVKGRFTISRDNSKNTLYLQMNSLRAEDTAVYYCARDEGRGYGGYERGYYYYYYGMDVWGQGTTVTVSS

SEQ ID NO: 31509 - DNA, 369 bp, synthetic construct
  misc_feature 1..369: note = Description of Artificial Sequence: Synthetic polynucleotide
  source 1..369: mol_type = other DNA
gaggtgcagctggtggaatctgggggaggcttggtacagcctggggggtccctgagactctcctgtgcagcctctggattcaccttcagtagctatagcatgaactgggtccgccaggctccagggaaggggctggagtggatttcatacattagtactagtagtagtaccatattctacgcagactctgtgaagggccgattcaccatctccagagacagtgccaagaactcactgtatctgcaaatgaacagcctgagagacgaggacacggctgtgtattactgtgcgaggggggatacagctatggtcctctactactacggtatggacgtctggggccaagggaccacggtcaccgtctcctca

SEQ ID NO: 31510 - protein, 123 aa, synthetic construct
  REGION 1..123: note = Description of Artificial Sequence: Synthetic polypeptide
EVQLVESGGGLVQPGGSLRLSCAASGFTFSSYSMNWVRQAPGKGLEWISYISTSSSTIFYADSVKGRFTISRDSAKNSLYLQMNSLRDEDTAVYYCARGDTAMVLYYYGMDVWGQGTTVTVSS

SEQ ID NO: 31511 - DNA, 369 bp, synthetic construct
  misc_feature 1..369: note = Description of Artificial Sequence: Synthetic polynucleotide
  source 1..369: mol_type = other DNA
gaggtgcagctggtggagtctgggggaggcttggtacagcctggggggtccctgagactctcctgtggagcctctggattcaccttcagtagctatagcatgaactgggtccgccaggctccagggaagggactggagtgggtttcatacattagtgggagtagtaatatcatatactacacagactctgtgaagggccgattcaccatctccagagacaatgccaagaactcactgtatctgcaaatgaacagcctgagagacgaggacacggctgtgtattactgtgcgagagcggatacacctatggtcctttacttctacggtatggacgtctggggccaagggaccacggtcaccgtctcctca

SEQ ID NO: 31512 - protein, 123 aa, synthetic construct
  REGION 1..123: note = Description of Artificial Sequence: Synthetic polypeptide
EVQLVESGGGLVQPGGSLRLSCGASGFTFSSYSMNWVRQAPGKGLEWVSYISGSSNIIYYTDSVKGRFTISRDNAKNSLYLQMNSLRDEDTAVYYCARADTPMVLYFYGMDVWGQGTTVTVSS

SEQ ID NO: 31513 - DNA, 387 bp, synthetic construct
  misc_feature 1..387: note = Description of Artificial Sequence: Synthetic polynucleotide
  source 1..387: mol_type = other DNA
caggtgcagctggtggagtctgggggaggcgtggtccagcctgggaggtccctgagactctcctgtgcagcgtctggattcaccttcagtagttatggcgtgcactgggtccgccaggctccaggcaaggggctggagtgggtggcagctatatggtatgatggaagtaataaatactatgcagactccgtgaagggccgattcaccatctccagagacaattccaagaacacgctgtatctgctaatgaacagcctgagagccgaggacacggctgtgtattactgtgcgagagatagggactattgtagtagttccagctgcccttactactactactacggtatggacgtctggggccaagggaccacggtcaccgtctcctca

SEQ ID NO: 31514 - protein, 129 aa, synthetic construct
  REGION 1..129: note = Description of Artificial Sequence: Synthetic polypeptide
QVQLVESGGGVVQPGRSLRLSCAASGFTFSSYGVHWVRQAPGKGLEWVAAIWYDGSNKYYADSVKGRFTISRDNSKNTLYLLMNSLRAEDTAVYYCARDRDYCSSSSCPYYYYYGMDVWGQGTTVTVSS

SEQ ID NO: 31515 - DNA, 354 bp, synthetic construct
  misc_feature 1..354: note = Description of Artificial Sequence: Synthetic polynucleotide
  source 1..354: mol_type = other DNA
cagatcaccttgaaggagtctggtcctacgctggtgaaacccacacagaccctcacgctgacctgcaccttctctgggttctcactcagtactagtggagtgggtgtgggctggatccgtcagcccccaggaaaggccctggagtggcttgcactcatttattggcatgaagataagcgctacagcccatctctgaagagcaggctcaccatcactgaggacacctccaaaaaccaggtggaccttacaatgaccaacatggcccctgtggacacagccacatattactgtgcacacgtcacatatatagcagctccctactggggccagggaaccctggtcaccgtctcctca

SEQ ID NO: 31516 - protein, 118 aa, synthetic construct
  REGION 1..118: note = Description of Artificial Sequence: Synthetic polypeptide
QITLKESGPTLVKPTQTLTLTCTFSGFSLSTSGVGVGWIRQPPGKALEWLALIYWHEDKRYSPSLKSRLTITEDTSKNQVDLTMTNMAPVDTATYYCAHVTYIAAPYWGQGTLVTVSS

SEQ ID NO: 31517 - DNA, 369 bp, synthetic construct
  misc_feature 1..369: note = Description of Artificial Sequence: Synthetic polynucleotide
  source 1..369: mol_type = other DNA
gaggtgcagctggtggagtctgggggaggcttggtacagcctggggggtccctgagactctcctgtggagcctctggattcaccttcagtagctatagcatgaactgggtccgccaggctccaggaaagggactggagtgggtttcatacattagtgagagtagtaatatcatatactacacagactctgtgaagggccgattcaccatctccagagacaatgccatgaactcactgtatctgcaaatgaacagcctgagagacgaggacacggctgtgtattactgtgcgagagcggatacacctatggtcctttacttctacggtatggacgtctggggccaagggaccacggtcaccgtctcctca

SEQ ID NO: 31518 - protein, 123 aa, synthetic construct
  REGION 1..123: note = Description of Artificial Sequence: Synthetic polypeptide
EVQLVESGGGLVQPGGSLRLSCGASGFTFSSYSMNWVRQAPGKGLEWVSYISESSNIIYYTDSVKGRFTISRDNAMNSLYLQMNSLRDEDTAVYYCARADTPMVLYFYGMDVWGQGTTVTVSS

SEQ ID NO: 31519 - DNA, 354 bp, synthetic construct; identical to SEQ ID NO: 31499
  misc_feature 1..354: note = Description of Artificial Sequence: Synthetic polynucleotide
  source 1..354: mol_type = other DNA

SEQ ID NO: 31520 - protein, 118 aa, synthetic construct; identical to SEQ ID NO: 31500
  REGION 1..118: note = Description of Artificial Sequence: Synthetic polypeptide

SEQ ID NO: 31521 - DNA, 354 bp, synthetic construct
  misc_feature 1..354: note = Description of Artificial Sequence: Synthetic polynucleotide
  source 1..354: mol_type = other DNA
cagatcaccttgaaggagtctggtcctacgctggtgaaacccacacagaccctcacgctgacctgcaccttctctgggttctcactcagtactagtgggttgggtgtgggctggatccgtcagcccccaggaaaggccctggagtggcttgcactcatttattcacatgaagataagcgctacagcccatctctgaagagcaggctcaccatcactgaggacacctccaaaaaccaggtggaccttacaatgaccaacatggcccctgtggacacagccacatattactgtgcacacgtcacaggtatagcagctccctactggggccagggaaccctggtcaccgtctcctca

SEQ ID NO: 31522 - protein, 118 aa, synthetic construct
  REGION 1..118: note = Description of Artificial Sequence: Synthetic polypeptide
QITLKESGPTLVKPTQTLTLTCTFSGFSLSTSGLGVGWIRQPPGKALEWLALIYSHEDKRYSPSLKSRLTITEDTSKNQVDLTMTNMAPVDTATYYCAHVTGIAAPYWGQGTLVTVSS

SEQ ID NO: 31523 - DNA, 357 bp, synthetic construct
  misc_feature 1..357: note = Description of Artificial Sequence: Synthetic polynucleotide
  source 1..357: mol_type = other DNA
cagatcaccttgaaggagtctggtcctacgctggtgaaacccacacagaccctcacgctgacctgcaccttctctgggttctcgctcagcactagtggagtgggtgtgggctggatccgtcagcccccaggaaaggccctggagtggcttgcactcattaattggaatgatgataagcgctacagcccatctctgaagagcaggttcaccatcaccagggacacctccaaagaccaggtggtccttacaatgaccaacatggaccctgtggacacagccacatattactgtgcacataaagctacctgggtggcttttgatatctggggccaagggacaatggtcaccgtctcttca

SEQ ID NO: 31524 - protein, 119 aa, synthetic construct
  REGION 1..119: note = Description of Artificial Sequence: Synthetic polypeptide
QITLKESGPTLVKPTQTLTLTCTFSGFSLSTSGVGVGWIRQPPGKALEWLALINWNDDKRYSPSLKSRFTITRDTSKDQVVLTMTNMDPVDTATYYCAHKATWVAFDIWGQGTMVTVSS

SEQ ID NO: 31525 - DNA, 357 bp, synthetic construct
  misc_feature 1..357: note = Description of Artificial Sequence: Synthetic polynucleotide
  source 1..357: mol_type = other DNA
cagatcaccttgaaggagtctggtcctacgctggtgaaacccacacagaccctcacgctgacctgtaccttctctgggttctcactcagcactagtggagtgggtgtgggctggatccgtcagcccccaggaaaggccctggagtggcttgcactcattaattggaatgatgataagcgctacagcccatctctgaagagcaggttcaccatcaccagggacacctccaaagaccaggtggtccttacaatgaccaacatggaccctgtggacacagccacatattactgtgcacataaagctacctgggtggcttttgatatctggggccaagggacaatggtcaccgtctcttca

SEQ ID NO: 31526 - protein, 119 aa, synthetic construct; identical to SEQ ID NO: 31524
  REGION 1..119: note = Description of Artificial Sequence: Synthetic polypeptide

SEQ ID NO: 31527 - DNA, 357 bp, synthetic construct
  misc_feature 1..357: note = Description of Artificial Sequence: Synthetic polynucleotide
  source 1..357: mol_type = other DNA
cagatcaccttgaaggagtctggtcctacgctggtgaaatccacacagaccctcacgctgacctgcaccttctctgggttctcactcagcactagtggagtgggtgtgggctggatccgtcagcccccaggaaaggccctggagtggcttgcactcattaattggaatgatgataagcgctacagcccatctctgaagagcaggttcaccatcaccagggacacctccaaagaccaggtggtccttacaatgaccaacatggaccctgtggacacagccacatattactgtgcacataaagctacctgggtggcttttgatatctggggccaagggacaatggtcaccgtctcttca

SEQ ID NO: 31528 - protein, 119 aa, synthetic construct
  REGION 1..119: note = Description of Artificial Sequence: Synthetic polypeptide
QITLKESGPTLVKSTQTLTLTCTFSGFSLSTSGVGVGWIRQPPGKALEWLALINWNDDKRYSPSLKSRFTITRDTSKDQVVLTMTNMDPVDTATYYCAHKATWVAFDIWGQGTMVTVSS

SEQ ID NO: 31529 - DNA, 357 bp, synthetic construct
  misc_feature 1..357: note = Description of Artificial Sequence: Synthetic polynucleotide
  source 1..357: mol_type = other DNA
cagatcaccttgaaggagtctggtcctacgctggtgaaacccacacagaccctcacgctgacctgcaccttctctgggttctcactcagcactagtggagtgggtgtgggctggatccgtcagcccccaggaaaggccctggagtggcttgcactcattaattggaatgatgataaacgctacagcccatctctgaagagcaggttcaccatcaccagggacacctccaaagaccaggtggtccttacaatgaccaacatggaccctctggacacagccacatattactgtgcacataaaactacctgggtggcttttgatatctggggccaagggacaatggtcaccgtctcttca

SEQ ID NO: 31530 - protein, 119 aa, synthetic construct
  REGION 1..119: note = Description of Artificial Sequence: Synthetic polypeptide
QITLKESGPTLVKPTQTLTLTCTFSGFSLSTSGVGVGWIRQPPGKALEWLALINWNDDKRYSPSLKSRFTITRDTSKDQVVLTMTNMDPLDTATYYCAHKTTWVAFDIWGQGTMVTVSS

SEQ ID NO: 31531 - DNA, 357 bp, synthetic construct
  misc_feature 1..357: note = Description of Artificial Sequence: Synthetic polynucleotide
  source 1..357: mol_type = other DNA
cagatcaccttgaaggagtctggtcctacgctggtgaaacccacacagaccctcacgctgacctgcaccttctctgggttctcactcaacactagtggagtgggtgtgggctggatccgtcagcccccaggaaaggccctggagtggcttgcactcattaattggaatgatgataagcgctacagcccgtctctgaagagcaggttcaccatcaccagggacacctccaaagaccaggtggtccttacaatgaccaacatggaccctgtggacacagccacatattactgtgcacataaagctacctgggtggcttttgatatctggggccaagggacaatggtcaccgtctcttca

SEQ ID NO: 31532 - protein, 119 aa, synthetic construct
  REGION 1..119: note = Description of Artificial Sequence: Synthetic polypeptide
QITLKESGPTLVKPTQTLTLTCTFSGFSLNTSGVGVGWIRQPPGKALEWLALINWNDDKRYSPSLKSRFTITRDTSKDQVVLTMTNMDPVDTATYYCAHKATWVAFDIWGQGTMVTVSS

SEQ ID NO: 31533 - DNA, 378 bp, synthetic construct
  misc_feature 1..378: note = Description of Artificial Sequence: Synthetic polynucleotide
  source 1..378: mol_type = other DNA
gaggtgcagctggtggagtctgggggaggcttggtacagcctggggggtccctgagactctcctgtgcagcctctggattcaccttcagtagctatagcatgaactgggtccgccaggctccggggaaggggctggagtgggtttcatacattagtagtagtactagtaccatatactacgcagcctctgtgaagggccgattcaccatctccagagacaatgccaagaactcactgtatctgcaaatgaacagcctgagagacgaggacacggctgtgtattactgtgcgagagatcaccgttactatgatagtagtggttattactctgatgcttttgatatctggggccaagggacaatggtcaccgtctcttca

SEQ ID NO: 31534 - protein, 126 aa, synthetic construct
  REGION 1..126: note = Description of Artificial Sequence: Synthetic polypeptide
EVQLVESGGGLVQPGGSLRLSCAASGFTFSSYSMNWVRQAPGKGLEWVSYISSSTSTIYYAASVKGRFTISRDNAKNSLYLQMNSLRDEDTAVYYCARDHRYYDSSGYYSDAFDIWGQGTMVTVSS

SEQ ID NO: 31535 - DNA, 378 bp, synthetic construct
  misc_feature 1..378: note = Description of Artificial Sequence: Synthetic polynucleotide
  source 1..378: mol_type = other DNA
gaggtgcagctggtggagtctgggggaggcttggtacagcctggggggtccctgagactctcctgtgcagcctctggattcaccttcagtagctatagcatgaactgggtccgccaggctccggggaaggggctggagtgggtttcatacattagtagtagtactagtaccatatactacgcagcctctgtgaagggccgattcaccatctccagagacaatgccaagaattcactgtatctgcaaatgaacagcctgagagacgaggacacggctgtgtattactgtgcgagagatcaccgttactatgatagtagtggttattactctgatgcttttgatatctggggccaagggacaatggtcaccgtctcttca

SEQ ID NO: 31536 - protein, 126 aa, synthetic construct; identical to SEQ ID NO: 31534
  REGION 1..126: note = Description of Artificial Sequence: Synthetic polypeptide

SEQ ID NO: 31537 - DNA, 372 bp, synthetic construct
  misc_feature 1..372: note = Description of Artificial Sequence: Synthetic polynucleotide
  source 1..372: mol_type = other DNA
caggtgcagctggtgcagtctggggctgaggtgaagaagcctggggcctcagtgaaggtctcctgcaaggcttctggatacaccttcaccggctactatatgcactgggtgcgacaggcccctggacaagggcttgagtggatgggatggatcaaccctaacagtggtggcacaaattatgcacagaagtttcagggcagggtcaccatgaccagggacacgtccatcagcacagcctacatggagctgagcaggctgagatctgacgacacggccgtgtattactgtgcgagagcgtattattatggttcggggagttattataatgaatttgatatgtggggccaagggacaatggtcaccgtctcttca

SEQ ID NO: 31538 - protein, 124 aa, synthetic construct
  REGION 1..124: note = Description of Artificial Sequence: Synthetic polypeptide
QVQLVQSGAEVKKPGASVKVSCKASGYTFTGYYMHWVRQAPGQGLEWMGWINPNSGGTNYAQKFQGRVTMTRDTSISTAYMELSRLRSDDTAVYYCARAYYYGSGSYYNEFDMWGQGTMVTVSS

SEQ ID NO: 31539 - DNA, 357 bp, synthetic construct
  misc_feature 1..357: note = Description of Artificial Sequence: Synthetic polynucleotide
  source 1..357: mol_type = other DNA
cagatcaccttgaaggagtctggtcctacgctggtgaaacccacacagaccctcacgctgacctgcaccttctctgggttctcactcagcactagtggagtgggtgtgggctggatccgtcagcccccaggaaaggccctggagtggcttgcactcattaattggaatgatgataagcgcttcagcccatctctgaagagcaggttcaccatcaccagggacacctccaaagaccaggtggtccttacaatgaccaacatggaccctgtggacacagccacatattactgtgcacataaagctacctgggtggcttttgatatctggggccaagggacaatggtcaccgtctcttca

SEQ ID NO: 31540 - protein, 119 aa, synthetic construct
  REGION 1..119: note = Description of Artificial Sequence: Synthetic polypeptide
QITLKESGPTLVKPTQTLTLTCTFSGFSLSTSGVGVGWIRQPPGKALEWLALINWNDDKRFSPSLKSRFTITRDTSKDQVVLTMTNMDPVDTATYYCAHKATWVAFDIWGQGTMVTVSS

SEQ ID NO: 31541 - DNA, 372 bp, synthetic construct
  misc_feature 1..372: note = Description of Artificial Sequence: Synthetic polynucleotide
  source 1..372: mol_type = other DNA
caggtgcagctggtgcagtctggggctgaggtgaagaagcctggggcctcagtgaaggtctcctgcaaggcttctggatacaccttcaccggctactatatgcactgggtgcgacaggcccctggacaagggcttgagtggatgggatggatcaaccctaacagtggtggcacaaactatggacagaagtttcagggcagggtcaccatgaccagggacacgtccatcagcacagcctacatggagctgagcaggctgagatctgacgacacggccgtatattactgtgcgagaacgtatttctatggttcggggagttattataacggctttgactactggggccagggaaccctggtcaccgtctcctca

SEQ ID NO: 31542 - protein, 124 aa, synthetic construct
  REGION 1..124: note = Description of Artificial Sequence: Synthetic polypeptide
QVQLVQSGAEVKKPGASVKVSCKASGYTFTGYYMHWVRQAPGQGLEWMGWINPNSGGTNYGQKFQGRVTMTRDTSISTAYMELSRLRSDDTAVYYCARTYFYGSGSYYNGFDYWGQGTLVTVSS

SEQ ID NO: 31543 - DNA, 372 bp, synthetic construct
  misc_feature 1..372: note = Description of Artificial Sequence: Synthetic polynucleotide
  source 1..372: mol_type = other DNA
caggtacagctgcagcagtcaggtccaggactggtgaagccctcgcagaccctctcactcacctgtgccatctccggggacagtgtctctagcaacagtgctgcttggaactggatcaggcagtccccatcgagaggccttgagtggctgggaaggacatactacaggtccgagtgctataatgattatgcagtatctgtgcagagtcgaataaccatcaacccagacacatccaagaaccagttctccctgcacctgaactctgtgactcccgaggacacggctgtgtatttctgtgcaagagatagagggcatagagggttctacggtatggacgtctggggccaagggaccacggtcaccgtctcctca

SEQ ID NO: 31544 - protein, 124 aa, synthetic construct
  REGION 1..124: note = Description of Artificial Sequence: Synthetic polypeptide
QVQLQQSGPGLVKPSQTLSLTCAISGDSVSSNSAAWNWIRQSPSRGLEWLGRTYYRSECYNDYAVSVQSRITINPDTSKNQFSLHLNSVTPEDTAVYFCARDRGHRGFYGMDVWGQGTTVTVSS

SEQ ID NO: 31545 - DNA, 372 bp, synthetic construct
  misc_feature 1..372: note = Description of Artificial Sequence: Synthetic polynucleotide
  source 1..372: mol_type = other DNA
caggtgcagatggtgcagtctggggatgaggtgaagaagcctggggcctcagtgaaggtctcgtgcaaggcttcgggatacaccttcaccggctaccatatgcactgggtgcgacaggcccctggacaagggcttgagtggatgggatggatcaaccctaacagtggtggcacaaattatgcacagaagtttcagggcagggtcaccatgaccagggacacgtccatcagcacagcctacatggagctgagcaggatgagatctgacgacacggccgtgtattactgtgcgagagcgtattattatggttcggggagttattataatgaatctgatatgtggggccaagggacaatggtcaccgtctcttca

SEQ ID NO: 31546 - protein, 124 aa, synthetic construct
  REGION 1..124: note = Description of Artificial Sequence: Synthetic polypeptide
QVQMVQSGDEVKKPGASVKVSCKASGYTFTGYHMHWVRQAPGQGLEWMGWINPNSGGTNYAQKFQGRVTMTRDTSISTAYMELSRMRSDDTAVYYCARAYYYGSGSYYNESDMWGQGTMVTVSS

SEQ ID NO: 31547 - DNA, 372 bp, synthetic construct
  misc_feature 1..372: note = Description of Artificial Sequence: Synthetic polynucleotide
  source 1..372: mol_type = other DNA
caggtgcagctggtgcagtccggggctgaggtgaagaagcctggggcctcagtgagggtctcctgcaaggcttctggatacaccttcaccggctactatatgcactgggtgcgacaggcccctggacaagggcttgagtggatgggatggatcaaccctaacagtggtggcacaaactatggacagaagtttcaggacagggtcaccatgaccagggacacgtccatcagcacagccttcatggagctgagcaggctgagatctgacgacacggccgcatattactgtgcgagaacgtattactatgggtcggggagttattataacggctttgactactggggccagggaaccctggtcaccgtctcctca

SEQ ID NO: 31548 - protein, 124 aa, synthetic construct
  REGION 1..124: note = Description of Artificial Sequence: Synthetic polypeptide
QVQLVQSGAEVKKPGASVRVSCKASGYTFTGYYMHWVRQAPGQGLEWMGWINPNSGGTNYGQKFQDRVTMTRDTSISTAFMELSRLRSDDTAAYYCARTYYYGSGSYYNGFDYWGQGTLVTVSS

SEQ ID NO: 31549 - DNA, 372 bp, synthetic construct
  misc_feature 1..372: note = Description of Artificial Sequence: Synthetic polynucleotide
  source 1..372: mol_type = other DNA
caggtgcagctggtgcagtctggggctgaggtgaagaagcctggggcctcagtgaaggtctcctgcaaggcttctggatacaccttcaccggctactgtatgcactgggtgcgacaggcccctggacaagggcttgagtggatgggatggatcaaccctaacagtggtggcacaaactatgcacagaagtttcaggtcagggtcaccatgaccagggacacgtccgtcagcacagtctacatggacctgagcaggctgagatctgacgacacggccgtgtattactgtgcgagagcgtattactatggttcggggacttatcataacgaatttgactactggggccagggaagtttggtcaccgtctcctca

SEQ ID NO: 31550 - protein, 124 aa, synthetic construct
  REGION 1..124: note = Description of Artificial Sequence: Synthetic polypeptide
QVQLVQSGAEVKKPGASVKVSCKASGYTFTGYCMHWVRQAPGQGLEWMGWINPNSGGTNYAQKFQVRVTMTRDTSVSTVYMDLSRLRSDDTAVYYCARAYYYGSGTYHNEFDYWGQGSLVTVSS

SEQ ID NO: 31551 - DNA, 372 bp, synthetic construct
  misc_feature 1..372: note = Description of Artificial Sequence: Synthetic polynucleotide
  source 1..372: mol_type = other DNA
caggtgcagctggtgcagtctggggctgaggtgaagaagcctggggcctcagtgaaggtctcctgcaaggcttctggatacaccttcaccggctactatatgcactgggtgcgacaggcccctggacaagggcttgagtggatgggatggatcaaccctaacagtggtggcacaaactatggacagaagtttcagggcagggtcaccatgaccagggacacgtccatcagcacagcctacatggagctgagcaggctgagatctgacgacacggccgtatattactgtgcgagaacgtattactatggttcggggagttattataacggctttgactactggggccagggaaccctggtcaccgtctcctca

SEQ ID NO: 31552 - protein, 124 aa, synthetic construct
  REGION 1..124: note = Description of Artificial Sequence: Synthetic polypeptide
QVQLVQSGAEVKKPGASVKVSCKASGYTFTGYYMHWVRQAPGQGLEWMGWINPNSGGTNYGQKFQGRVTMTRDTSISTAYMELSRLRSDDTAVYYCARTYYYGSGSYYNGFDYWGQGTLVTVSS

SEQ ID NO: 31553 - DNA, 357 bp, synthetic construct
  misc_feature 1..357: note = Description of Artificial Sequence: Synthetic polynucleotide
  source 1..357: mol_type = other DNA
cagatcaccttgaaggagtctggtcctacgctggtgaaacccacacagaccctcacgctgacctgcaccttctctgggttctcactcagcactagtggagtgggtgtgggctggatccgtcagcccccaggaaaggccctggagtggcttgcactcattaattggaatgatgataagcgctacagcccatctctgaagagcaggttcaccatcaccagggacacctccaaagaccaggtggtctttacaatgaccaacatggaccctgtggacacaggcacatattactgtgcacataaagctacctgggtggcttttgatatctggggccaagggacaatggtcaccgtctcttca

SEQ ID NO: 31554 - protein, 119 aa, synthetic construct
  REGION 1..119: note = Description of Artificial Sequence: Synthetic polypeptide
QITLKESGPTLVKPTQTLTLTCTFSGFSLSTSGVGVGWIRQPPGKALEWLALINWNDDKRYSPSLKSRFTITRDTSKDQVVFTMTNMDPVDTGTYYCAHKATWVAFDIWGQGTMVTVSS

SEQ ID NO: 31555 - DNA, 354 bp, synthetic construct
  misc_feature 1..354: note = Description of Artificial Sequence: Synthetic polynucleotide
  source 1..354: mol_type = other DNA
caggtgcagctggtggagtctgggggaggcgtggtccagcctgggaggtccctgagactctcctgtgcaggcactggattcaccttcagttactatggcatgcactgggtccgccaggctccaggcaaggggctggagtgggtggcagttacaacatatgatggaagtaataaatactatgcagactccgtgaagggccgattcaccagctccagagacaattccaagaacacgctgtatctgcaaatgaatagcctgagagctgaggacacggctgtgtatcactgtgcgagagagactggaacctgggcttttgatatctggggccaagggacaatggtcaccgtctcttta

SEQ ID NO: 31556 - protein, 118 aa, synthetic construct
  REGION 1..118: note = Description of Artificial Sequence: Synthetic polypeptide
QVQLVESGGGVVQPGRSLRLSCAGTGFTFSYYGMHWVRQAPGKGLEWVAVTTYDGSNKYYADSVKGRFTSSRDNSKNTLYLQMNSLRAEDTAVYHCARETGTWAFDIWGQGTMVTVSL

SEQ ID NO: 31557 - DNA, 357 bp, synthetic construct
  misc_feature 1..357: note = Description of Artificial Sequence: Synthetic polynucleotide
  source 1..357: mol_type = other DNA
cagatcaccttgaaggagtctggtcctacgctggtgaaacccacacagaccctcacgctgacctgcaccttctctgggttctcactcagcactagtggagtgggtgtgggctggatccgtcagcccccaggaaaggccctggagtggcttgcactcattaattggaatgatgataagcgctacagcccatctctgaagagcaggttcaccatcaccagggacacctccaaagaccaggtggtccttacaatgaccaacatggaccctgtggacacagccacatattactgtgcacataaaactacctgggtggcttttgatatctggggccaagggacaatggtcaccgtctcttca

SEQ ID NO: 31558 - protein, 119 aa, synthetic construct
  REGION 1..119: note = Description of Artificial Sequence: Synthetic polypeptide
QITLKESGPTLVKPTQTLTLTCTFSGFSLSTSGVGVGWIRQPPGKALEWLALINWNDDKRYSPSLKSRFTITRDTSKDQVVLTMTNMDPVDTATYYCAHKTTWVAFDIWGQGTMVTVSS

SEQ ID NO: 31559 - DNA, 354 bp, synthetic construct
  misc_feature 1..354: note = Description of Artificial Sequence: Synthetic polynucleotide
  source 1..354: mol_type = other DNA
cagatcaccttgaaggagtctggtcctacgctggtgaaacccacacagaccctcacgctgacctgcaccttctctgggttctcactcagcactggtggagtgggtgtgggctggatccgtcagcccccaggaaaggccctggagtggcttgcactcatttattgggatgatgataagcgctacagcccatctctgaagagcaggctcaccatcaccaaggacacccccaaaaaccaggtggtccttacaatgaccaacatggaccctgtggacacagccacatattactgtgcacaccttatagcagtggcctttgactactggggccagggaaccctggtcaccgtctcctca

SEQ ID NO: 31560 - protein, 118 aa, synthetic construct
  REGION 1..118: note = Description of Artificial Sequence: Synthetic polypeptide
QITLKESGPTLVKPTQTLTLTCTFSGFSLSTGGVGVGWIRQPPGKALEWLALIYWDDDKRYSPSLKSRLTITKDTPKNQVVLTMTNMDPVDTATYYCAHLIAVAFDYWGQGTLVTVSS

SEQ ID NO: 31561 - DNA, 387 bp, synthetic construct
  misc_feature 1..387: note = Description of Artificial Sequence: Synthetic polynucleotide
  source 1..387: mol_type = other DNA
caggtgcaactggtggagtctgggggaggcgtggtccagcctgggaggtccctgagactctcctgtgcagcgtctggattcaccttcagtagctatggcatgcactgggtccgccaggctccaggcaaggggctggagtgggtggcagttatatggtatgatggaaataataaatcctatgcagactccgtgaagggccgattcaccatctccagagacatttccaagaacacgctgtttctgcaaatgaacagcctgagagccgatgacacggctgtgtattactgtgcgagagatcgagattattgtagtggtaccagctgcccttattattactactacggtatggacgtctggggccaagggaccacggtcaccgtctcctca

SEQ ID NO: 31562 - protein, 129 aa, synthetic construct
  REGION 1..129: note = Description of Artificial Sequence: Synthetic polypeptide
QVQLVESGGGVVQPGRSLRLSCAASGFTFSSYGMHWVRQAPGKGLEWVAVIWYDGNNKSYADSVKGRFTISRDISKNTLFLQMNSLRADDTAVYYCARDRDYCSGTSCPYYYYYGMDVWGQGTTVTVSS

SEQ ID NO: 31563 - DNA, 354 bp, synthetic construct
  misc_feature 1..354: note = Description of Artificial Sequence: Synthetic polynucleotide
  source 1..354: mol_type = other DNA
cagatcaccttgaaggagtctggtccttcgctggtgaaacccacacagaccctcacgctgacctgcaccttctctgggttctcactcagcactagtggagtgggtgtgggctggatccgtcagcccccaggaaaggccctggagtggcttgtattcatttattgggatgatgataagcgctacagcccatctctgaagagcaggctcaccatcaccaaggacacctccaaaaaccaggtggtccttacaatgaccaacatggaccctgtggacacagccacatattactgtgcacaccttatagcagtggcctttgactactggggccagggaaccctggtcaccgtctcctca

SEQ ID NO: 31564 - protein, 118 aa, synthetic construct
  REGION 1..118: note = Description of Artificial Sequence: Synthetic polypeptide
QITLKESGPSLVKPTQTLTLTCTFSGFSLSTSGVGVGWIRQPPGKALEWLVFIYWDDDKRYSPSLKSRLTITKDTSKNQVVLTMTNMDPVDTATYYCAHLIAVAFDYWGQGTLVTVSS

SEQ ID NO: 31565 - DNA, 357 bp, synthetic construct
  misc_feature 1..357: note = Description of Artificial Sequence: Synthetic polynucleotide
  source 1..357: mol_type = other DNA
caggtgcagctgcaggagtcgggcccaggactggtgaagccttcacagaccctgtccctcacctgcactgtctctggtggctccatcagaagtggtggttactactggagctggatccgccagcacccagggaagggcctggagtggattggatacatctattacagtgggagcacctactacaacccgtccctcaggagtcgagcttccatatcagtagacacgtctaagaaccagttctccctgaagctgagctctgtgactgccgcggacacggccgtgtattactgtgcgagagattcaccagtggctggtactgactactggggccagggaaccctggtcaccgtctcctca

SEQ ID NO: 31566 - protein, 119 aa, synthetic construct
  REGION 1..119: note = Description of Artificial Sequence: Synthetic polypeptide
QVQLQESGPGLVKPSQTLSLTCTVSGGSIRSGGYYWSWIRQHPGKGLEWIGYIYYSGSTYYNPSLRSRASISVDTSKNQFSLKLSSVTAADTAVYYCARDSPVAGTDYWGQGTLVTVSS

SEQ ID NO: 31567 - DNA, 387 bp, synthetic construct
  misc_feature 1..387: note = Description of Artificial Sequence: Synthetic polynucleotide
  source 1..387: mol_type = other DNA
caggtgcagctggtggagtctgggggaggcgtggtccagcctgggaggtccctgagactctcctgtgcagcgtctggattcaccttcagtagctatggcatgcactgggtccgccaggctccaggcaaggggctggagtgggtggcagttatatggtatgatggaaataataaatcctatgcagactccgtgaagggccgattcaccatctccagagacatttccaaaaacacgctgtatctgcaaatgaacagcctgagagccgaggacacggctgtgtattactgtgcgagggatcgagattattgtagtagtaccagctgcccttattattactactacggtatggacgtctggggccaagggaccacggtcaccgtctcctca

SEQ ID NO: 31568 - protein, 129 aa, synthetic construct
  REGION 1..129: note = Description of Artificial Sequence: Synthetic polypeptide
QVQLVESGGGVVQPGRSLRLSCAASGFTFSSYGMHWVRQAPGKGLEWVAVIWYDGNNKSYADSVKGRFTISRDISKNTLYLQMNSLRAEDTAVYYCARDRDYCSSTSCPYYYYYGMDVWGQGTTVTVSS

SEQ ID NO: 31569 - DNA, 387 bp, synthetic construct
  misc_feature 1..387: note = Description of Artificial Sequence: Synthetic polynucleotide
  source 1..387: mol_type = other DNA
caggtgcagctggtggagtctgggggaggcgtggtccagcctgggaggtccctgagactctcctgtgcagcgtcgggattcaccttcagtcgatatggcatgcactgggtccgccaggctccaggcaaggggctggagtgggtggcagttttttggtatgatggaagtaataaagactatgcagactccgtgaagggccgattcaccatctccagagacaattccaagaacacgctgtatctgcaaatgaacagcctgagagccgaggacacggctgtgtattactgtgcgagagatcgagattattgtagtagtaccagctgcccttactactactactacggtatggacgtctggggccaagggaccacggtcaccgtctcctca

SEQ ID NO: 31570 - protein, 129 aa, synthetic construct
  REGION 1..129: note = Description of Artificial Sequence: Synthetic polypeptide
QVQLVESGGGVVQPGRSLRLSCAASGFTFSRYGMHWVRQAPGKGLEWVAVFWYDGSNKDYADSVKGRFTISRDNSKNTLYLQMNSLRAEDTAVYYCARDRDYCSSTSCPYYYYYGMDVWGQGTTVTVSS

SEQ ID NO: 31571 - DNA, 357 bp, synthetic construct
  misc_feature 1..357: note = Description of Artificial Sequence: Synthetic polynucleotide
  source 1..357: mol_type = other DNA
caggtgcagctgcaggagtcgggcccaggactggtgaagccttcacagaccctgtccctcacctgcactgtctctggtggctccatcagcagtggtggttactactggagctggatccgccagcacccagggaagggcctggagtggattgggtacatctattacattgggagtgtttactacaacccgtccctcaagagtcgagttaccatatcagtagacacgtctaagaaccagttctccctgaagctgagctctgtgactgccgcggacacggccgtgtactactgtgcgagagatgcccccgacttcggtatggacgtctggggccaagggaccacggtcaccgtctcctca

SEQ ID NO: 31572 - protein, 119 aa, synthetic construct
  REGION 1..119: note = Description of Artificial Sequence: Synthetic polypeptide
QVQLQESGPGLVKPSQTLSLTCTVSGGSISSGGYYWSWIRQHPGKGLEWIGYIYYIGSVYYNPSLKSRVTISVDTSKNQFSLKLSSVTAADTAVYYCARDAPDFGMDVWGQGTTVTVSS

SEQ ID NO: 31573 - DNA, 387 bp, synthetic construct; identical to SEQ ID NO: 31567
  misc_feature 1..387: note = Description of Artificial Sequence: Synthetic polynucleotide
  source 1..387: mol_type = other DNA

SEQ ID NO: 31574 - protein, 129 aa, synthetic construct; identical to SEQ ID NO: 31568
  REGION 1..129: note = Description of Artificial Sequence: Synthetic polypeptide

SEQ ID NO: 31575 - DNA, 387 bp, synthetic construct
  misc_feature 1..387: note = Description of Artificial Sequence: Synthetic polynucleotide
  source 1..387: mol_type = other DNA
caggtgcagctggtggagtctgggggaggcgtggtccagcctgggaggtccctgagactctcctgtgcagcgtctggattcaccttcagtagctatggcatgcactgggtccgccaggctccaggcaaggggctggagtgggtggcagttatatggtatgatggaaataataaatcctatgcagactccgtgaagggccgattcaccatctacagagacatttccaagaacacgctgtatctgcaaatgaacagcctgagagccgaggacacggctgtgtattactgtgcgagagatcgagattattgtagtagtaccagctgcccttattattactactacggtatggacgtctggggccaagggaccacggtcaccgtctcctca

SEQ ID NO: 31576 - protein, 129 aa, synthetic construct
  REGION 1..129: note = Description of Artificial Sequence: Synthetic polypeptide
QVQLVESGGGVVQPGRSLRLSCAASGFTFSSYGMHWVRQAPGKGLEWVAVIWYDGNNKSYADSVKGRFTIYRDISKNTLYLQMNSLRAEDTAVYYCARDRDYCSSTSCPYYYYYGMDVWGQGTTVTVSS

SEQ ID NO: 31577 - DNA, 354 bp, synthetic construct
  misc_feature 1..354: note = Description of Artificial Sequence: Synthetic polynucleotide
  source 1..354: mol_type = other DNA
cagatcaccttgaaggagtctggtcctacgctggtgaaacccacacagaccctcacgctgacctgcaccttctctgggttctcactcagcactggtggagtgggtgtgggctggatccgtcagcccccaggaaaggccctggagtggcttgcactcatttattgggatgatgataagcgctacagcccatctctgaagagcaggctcaccatcaccaaggacacccccaaaaaccaggtggtccttacaatgaccaacatggaccctgtggacacagccacatattactgtgcacaccttatagcagtggcctgtgactactggggccagggaaccctggtcaccgtctcctca

SEQ ID NO: 31578 - protein, 118 aa, synthetic construct
  REGION 1..118: note = Description of Artificial Sequence: Synthetic polypeptide
QITLKESGPTLVKPTQTLTLTCTFSGFSLSTGGVGVGWIRQPPGKALEWLALIYWDDDKRYSPSLKSRLTITKDTPKNQVVLTMTNMDPVDTATYYCAHLIAVACDYWGQGTLVTVSS

SEQ ID NO: 31579 - DNA, 387 bp, synthetic construct; identical to SEQ ID NO: 31567
  misc_feature 1..387: note = Description of Artificial Sequence: Synthetic polynucleotide
  source 1..387: mol_type = other DNA

SEQ ID NO: 31580 - protein, 129 aa, synthetic construct; identical to SEQ ID NO: 31568
  REGION 1..129: note = Description of Artificial Sequence: Synthetic polypeptide

SEQ ID NO: 31581 - DNA, 363 bp, synthetic construct
  misc_feature 1..363: note = Description of Artificial Sequence: Synthetic polynucleotide
  source 1..363: mol_type = other DNA
gaggtgcagctgttggagtctgggggaggcttggtacagcctggggggtccctgagactctcctgtgcagcctctggattcacctttagcagctatgccatgagctgggtccgccaggctccagggaaggggctggagtgggtctcagttattagtggtggtggtactaccacatactacgcagactccgtgaagggccggttcaccatctccagagacaattccaagaacacgctgtatctgcaaatgaacagcctgagagccgaggacacggccgtatattactgtgcgaaatggcgaggtaaccccactgactacggtatggacgtctggggccaagggaccacggtcaccgtctcctca

SEQ ID NO: 31582 - protein, 121 aa, synthetic construct
  REGION 1..121: note = Description of Artificial Sequence: Synthetic polypeptide
EVQLLESGGGLVQPGGSLRLSCAASGFTFSSYAMSWVRQAPGKGLEWVSVISGGGTTTYYADSVKGRFTISRDNSKNTLYLQMNSLRAEDTAVYYCAKWRGNPTDYGMDVWGQGTTVTVSS

SEQ ID NO: 31583 - DNA, 387 bp, synthetic construct
  misc_feature 1..387: note = Description of Artificial Sequence: Synthetic polynucleotide
  source 1..387: mol_type = other DNA
caggtgcagctggtggagtctgggggaggcgtggtccagcctgggaggtccctgagactctcctgtgcagcgtctggattcaccttcagtacctatggcatgcactgggtccgccaggctccaggcaaggggctggagtgggtggcagttgtatggtatggtggaaatgataaagactttgcagactccgtgacgggccgattcaccatctccagagacatttccaagaacacactgtatctgcaaatgaacagcctgagagccgaggacacggctgtgtattactgtgcgagagatcgggattattgtagtggtggtagctgcccttactactactactacggtatggacgtctggggccaagggaccacggtcaccgtctcctca

SEQ ID NO: 31584 - protein, 129 aa, synthetic construct
  REGION 1..129: note = Description of Artificial Sequence: Synthetic polypeptide
QVQLVESGGGVVQPGRSLRLSCAASGFTFSTYGMHWVRQAPGKGLEWVAVVWYGGNDKDFADSVTGRFTISRDISKNTLYLQMNSLRAEDTAVYYCARDRDYCSGGSCPYYYYYGMDVWGQGTTVTVSS

SEQ ID NO: 31585 - DNA, 390 bp, synthetic construct
  misc_feature 1..390: note = Description of Artificial Sequence: Synthetic polynucleotide
  source 1..390: mol_type = other DNA
caggtgcagctggtgcagtctggggctgaggtgaagaagcctggggcctcagtgaaggtctcctgcaaggcttctggatacaccttcatcagttatgatatcaattgggtgcgacaggccactggacaagggcttgagtggatgggatggatgaaccctaacagtggtaacacaggctatgcacagaagttccagggcagagtcaccatgaccaggaacacctccaaaagcacagcctacatggagctgagcagcctgagatctgaggacacggccgtgtattactgtgcgagaggagattattactatgatagtagtggtcaccagccttactactactactacggtatggacgtctggggccaagggaccacggtcaccgtctcctca

SEQ ID NO: 31586 - protein, 130 aa, synthetic construct
  REGION 1..130: note = Description of Artificial Sequence: Synthetic polypeptide
QVQLVQSGAEVKKPGASVKVSCKASGYTFISYDINWVRQATGQGLEWMGWMNPNSGNTGYAQKFQGRVTMTRNTSKSTAYMELSSLRSEDTAVYYCARGDYYYDSSGHQPYYYYYGMDVWGQGTTVTVSS

SEQ ID NO: 31587 - DNA, 357 bp, synthetic construct
  misc_feature 1..357: note = Description of Artificial Sequence: Synthetic polynucleotide
  source 1..357: mol_type = other DNA
cagatcaccttgaaggagtctggtcctacgctggtgaaacccacacagcccctcacgctgacctgtaccttctctgggttctcactcagcactactggagtgggtgtgggctggatccgtcagcccccaggaaaggccctggagtggcttggaatccttttttggaatgatgatgagcgctacagcccatctctgaagagcaggctcaccatcaccaaggacacctccaaaaaccaggtggtccttacaatgaccaacatggaccctgtggacacagccacatattactgtgcacacaaatcgcagctcgtctactttgactactggggccagggaaccctggtcaccgtctcctca

SEQ ID NO: 31588 - protein, 119 aa, synthetic construct
  REGION 1..119: note = Description of Artificial Sequence: Synthetic polypeptide
QITLKESGPTLVKPTQPLTLTCTFSGFSLSTTGVGVGWIRQPPGKALEWLGILFWNDDERYSPSLKSRLTITKDTSKNQVVLTMTNMDPVDTATYYCAHKSQLVYFDYWGQGTLVTVSS

SEQ ID NO: 31589 - DNA, 387 bp, synthetic construct
  misc_feature 1..387: note = Description of Artificial Sequence: Synthetic polynucleotide
  source 1..387: mol_type = other DNA
caggtgcagctggtggagtctgggggaggcgtggtccagcctgggaggtccctgagactctcctgtgcagcgtctggattcaccttcagtagctatggcatgcactgggtccgccaggctccaggcaaggggctggagtgggtggcagttatatggtatgatggaagtaataaatactatgcagactccgtgaagggccgattcaccatctccagagacaattccaagaacacgctgtatctgcaaatgaacagcctgagagccgaggacacggctgtgtattactgtgcgagagaaaggacgtattgtagtggtaccacctgcccctactactactactacggtctgggcgtctggggccaagggaccacggtcaccgtctcctca

SEQ ID NO: 31590 - protein, 129 aa, synthetic construct
  REGION 1..129: note = Description of Artificial Sequence: Synthetic polypeptide
QVQLVESGGGVVQPGRSLRLSCAASGFTFSSYGMHWVRQAPGKGLEWVAVIWYDGSNKYYADSVKGRFTISRDNSKNTLYLQMNSLRAEDTAVYYCARERTYCSGTTCPYYYYYGLGVWGQGTTVTVSS

SEQ ID NO: 31591 - DNA, 351 bp, synthetic construct
  misc_feature 1..351: note = Description of Artificial Sequence: Synthetic polynucleotide
  source 1..351: mol_type = other DNA
caggtacagctggtggagtctgggggaggcgtggtccagcctgggaggtccctgagactctcctgtgcagcgtctggattcaccttcagtagttatggcatgctctgggtccgccaggctccaggcaaggggctggagtgggtgacagttatatggtatgatggaagtggtaaatactatgcagactccgtgaagggccgattcaccatctccagagacaattccaagaacacactgtatctgcaaatgaacagcctgagagccgaggacacggctgtttattactgtgcgagagagaatttttggagtggtgactactggggccagggaaccctggtcaccgtctcctca

SEQ ID NO: 31592 - protein, 117 aa, synthetic construct
  REGION 1..117: note = Description of Artificial Sequence: Synthetic polypeptide
QVQLVESGGGVVQPGRSLRLSCAASGFTFSSYGMLWVRQAPGKGLEWVTVIWYDGSGKYYADSVKGRFTISRDNSKNTLYLQMNSLRAEDTAVYYCARENFWSGDYWGQGTLVTVSS

SEQ ID NO: 31593 - DNA, 369 bp, synthetic construct
  misc_feature 1..369: note = Description of Artificial Sequence: Synthetic polynucleotide
  source 1..369: mol_type = other DNA
caggtgcagctggtggagtctgggggaggcgtggtccagcctgggaggtccctgagactctcctgtgcagtgtctggattcacctttagtagctatggcatgcactgggtccgccaggctccaggcaaggggctggagtgggtggcaattatatggtatgatggaagtaataaatactatgcagactccgtgaagggccgattcaccatctccagagacaattccaagaacacgctgtatctgcaaatgaacagcctgagagccgaggacacggctgtgtattactgtgcgagaggggggcccccgttctctacggtgactatgtactttgactactggggccagggaaccctggtcaccgtctcctca

SEQ ID NO: 31594 - protein, 123 aa, synthetic construct
  REGION 1..123: note = Description of Artificial Sequence: Synthetic polypeptide
QVQLVESGGGVVQPGRSLRLSCAVSGFTFSSYGMHWVRQAPGKGLEWVAIIWYDGSNKYYADSVKGRFTISRDNSKNTLYLQMNSLRAEDTAVYYCARGGPPFSTVTMYFDYWGQGTLVTVSS

SEQ ID NO: 31595 - DNA, 369 bp, synthetic construct
  misc_feature 1..369: note = Description of Artificial Sequence: Synthetic polynucleotide
  source 1..369: mol_type = other DNA
caggtgcagctggtggagtctgggggaggcgtggtccagcctgggaggtccctgagactctcctgtgcagcgtctggattcaccttcagtaactatggcatgcactgggtccgccaggctccaggcaaggggctggagtgggtggcaattatatggtatgatggaagtgataaatactatgcagactccgtgaagggccgattcaccatctccagagacaattccaagaacacgctgtatctgcaaatgaacaccctgagagccgaagacacggctgtgtatttctgtgcgagaggggggcccccgttctctacggtgactatgtactttgactactggggccagggaaccctggtcaccgtctcctca

SEQ ID NO: 31596 - protein, 123 aa, synthetic construct
  REGION 1..123: note = Description of Artificial Sequence: Synthetic polypeptide
QVQLVESGGGVVQPGRSLRLSCAASGFTFSNYGMHWVRQAPGKGLEWVAIIWYDGSDKYYADSVKGRFTISRDNSKNTLYLQMNTLRAEDTAVYFCARGGPPFSTVTMYFDYWGQGTLVTVSS

SEQ ID NO: 31597 - DNA, 354 bp, synthetic construct
  misc_feature 1..354: note = Description of Artificial Sequence: Synthetic polynucleotide
  source 1..354: mol_type = other DNA
cagatcaccctgaaggagtctggtcctacgctggtgaaacccacacagaccctcacgttgacctgcaccttctctgggttctcactcaccactggtggagtgggtgtgggctggatccgtcagcccccaggaaaggccctggagtggcttgcactcatttattggaatgatgatgagcgctacagcccatctctgaagagcaggctcaccatcaccaaggacacctccaaaaaccaggtggtccttacaatgaccaacatggaccctgtggacacagccacatattactgtgcacacattatagcagtggccttccagcattggggccagggcaccctggtcaccgtctcctca

SEQ ID NO: 31598 - protein, 118 aa, synthetic construct
  REGION 1..118: note = Description of Artificial Sequence: Synthetic polypeptide
QITLKESGPTLVKPTQTLTLTCTFSGFSLTTGGVGVGWIRQPPGKALEWLALIYWNDDERYSPSLKSRLTITKDTSKNQVVLTMTNMDPVDTATYYCAHIIAVAFQHWGQGTLVTVSS

SEQ ID NO: 31599 - DNA, 357 bp, synthetic construct
  misc_feature 1..357: note = Description of Artificial Sequence: Synthetic polynucleotide
  source 1..357: mol_type = other DNA
cagatcaccttgaaggagtctggtcctacgctggtgaaacccacacagaccctcacgctgacctgcaccttctctgggttctcactcagcactagtggagtgggtgtgggctggatccgtcagcccccaggaaaggccctggagtggcttggattcatttcttggaatgatgataagcgctacagcccatctctgaagagcagcctcaccatcaccaaggacacctccaaaaaccaggtggtccttacaatgaccaacatggaccctgtggacacagccacatattactgtgcacacaaagcagcagctgttgcttttgatatctggggccaagggacaatggtcaccgtctcttca

SEQ ID NO: 31600 - protein, 119 aa, synthetic construct
  REGION 1..119: note = Description of Artificial Sequence: Synthetic polypeptide
QITLKESGPTLVKPTQTLTLTCTFSGFSLSTSGVGVGWIRQPPGKALEWLGFISWNDDKRYSPSLKSSLTITKDTSKNQVVLTMTNMDPVDTATYYCAHKAAAVAFDIWGQGTMVTVSS

SEQ ID NO: 31601 - DNA, 357 bp, synthetic construct
  misc_feature 1..357: note = Description of Artificial Sequence: Synthetic polynucleotide
  source 1..357: mol_type = other DNA
caggtgcagctgcaggagtcgggcccaggactggtgaagccttcacagaccctgtccctcacctgcactgtctctggtggctccatcagcagtggtggttactactggagctggatccgccagcacccagggaagggcctggagtggattggatacatctattacagtgggagcacctactacaacccgtccctcaagagtcgagtcaccatatcagtagacacgtctaagaaccagttctccctgaagctgagctctgtgactgccgcggacacggccgtttattactgtgcgagagattccccactacgaggctttgactactggggccagggaaccctggtcaccgtctcctca

SEQ ID NO: 31602 - protein, 119 aa, synthetic construct
  REGION 1..119: note = Description of Artificial Sequence: Synthetic polypeptide
QVQLQESGPGLVKPSQTLSLTCTVSGGSISSGGYYWSWIRQHPGKGLEWIGYIYYSGSTYYNPSLKSRVTISVDTSKNQFSLKLSSVTAADTAVYYCARDSPLRGFDYWGQGTLVTVSS

SEQ ID NO: 31603 - DNA, 351 bp, synthetic construct
  misc_feature 1..351: note = Description of Artificial Sequence: Synthetic polynucleotide
  source 1..351: mol_type = other DNA
caggtgcagctggtggagtctgggggaggcgtggtccagcctgggaggtccctgagactctcctgtgcagcctctggattcaccttcagaagctatggcatgcattgggtccgccaggctccaggcaaggggctggagtgggtggcagttataatatatgatggaagttataagtactatgcagactccgtgaagggccgattcaccatctccagagacaattccaagaacacgctgtatctgcaaatgaacagcctgagagctgaggacacggctgtgtattactgtgcgagaacgtatagcgggggtatggacgtctggggccaagggaccacggtcaccgtctcctca

SEQ ID NO: 31604 - protein, 117 aa, synthetic construct
  REGION 1..117: note = Description of Artificial Sequence: Synthetic polypeptide
QVQLVESGGGVVQPGRSLRLSCAASGFTFRSYGMHWVRQAPGKGLEWVAVIIYDGSYKYYADSVKGRFTISRDNSKNTLYLQMNSLRAEDTAVYYCARTYSGGMDVWGQGTTVTVSS

SEQ ID NO: 31605 - DNA, 360 bp, synthetic construct
  misc_feature 1..360: note = Description of Artificial Sequence: Synthetic polynucleotide
  source 1..360: mol_type = other DNA
caggtacagctgcagcagtcaggtccaggactggtgaagccctcgcagaccctctcactcacctgtgacatctccggggacagtgtctctaggaaaagtgctacttggaactggatcaggcagtccccatcgagaggccttgagtggctgggaaagacatactacaggtccaagtggtataatgattatgcagtatctgtgaaaagtcgaataaccatcaatccagacacatccaagaaccagttctccctgcaattgaactctgtgactcccgaggacacggctgtgtattactgtgcaagagatccgggtggcctctttgactactggggccagggaaccctggtcaccgtctcctca

SEQ ID NO: 31606 - protein, 120 aa, synthetic construct
  REGION 1..120: note = Description of Artificial Sequence: Synthetic polypeptide
QVQLQQSGPGLVKPSQTLSLTCDISGDSVSRKSATWNWIRQSPSRGLEWLGKTYYRSKWYNDYAVSVKSRITINPDTSKNQFSLQLNSVTPEDTAVYYCARDPGGLFDYWGQGTLVTVSS

SEQ ID NO: 31607 - DNA, 375 bp, synthetic construct
  misc_feature 1..375: note = Description of Artificial Sequence: Synthetic polynucleotide
  source 1..375: mol_type = other DNA
caggtgcagctggtggaatctgggggaggcgtggtccagcctgggaggtccctgagactctcctgtgcagcgtctggattcaccttcaataactatggcatacactgggtccgccaggctccaggcaaggggctggagtgggtggcagttatatggtttgatggagataataaatactatgcagactccgtgaagggccgattcaccatctccagagacaattccaagaacacgctgtatctgcaaatgaacagcctgagagccgaagacacggctgtgtattactgtgcgagagataactggaactacggcgatcactactactacttcggtatggacgtctggggccaagggaccacggtcaccgtctcctca

SEQ ID NO: 31608 - protein, 125 aa, synthetic construct
  REGION 1..125: note = Description of Artificial Sequence: Synthetic polypeptide
QVQLVESGGGVVQPGRSLRLSCAASGFTFNNYGIHWVRQAPGKGLEWVAVIWFDGDNKYYADSVKGRFTISRDNSKNTLYLQMNSLRAEDTAVYYCARDNWNYGDHYYYFGMDVWGQGTTVTVSS

SEQ ID NO: 31609 - DNA, 357 bp, synthetic construct
  misc_feature 1..357: note = Description of Artificial Sequence: Synthetic polynucleotide
  source 1..357: mol_type = other DNA
caggtgcagctggtggagtctgggggaggcgtggtccagcctgggaggtccctgagactctcctgtgcagcgtctggattcaccttcagtagctatggcatgcactgggtccgccaggctccaggcaaggggctggagtgggtggcagttatatggtatgatggaagtaataaatactatgcagactccgtgaagggccgattcaccatctccagagacaattccaagaacacgctgtatctgcaaatgaacagcctgagagccgaggacacggctgtgtattactgtgcgaactggtactactactactacggtatggacgtctggggccaagggaccacggtcaccgtctcctca

SEQ ID NO: 31610 - protein, 119 aa, synthetic construct
  REGION 1..119: note = Description of Artificial Sequence: Synthetic polypeptide
QVQLVESGGGVVQPGRSLRLSCAASGFTFSSYGMHWVRQAPGKGLEWVAVIWYDGSNKYYADSVKGRFTISRDNSKNTLYLQMNSLRAEDTAVYYCANWYYYYYGMDVWGQGTTVTVSS

SEQ ID NO: 31611 - DNA, 378 bp, synthetic construct
  misc_feature 1..378: note = Description of Artificial Sequence: Synthetic polynucleotide
  source 1..378: mol_type = other DNA
caggtgcagctggtggagtctgggggaggcgtggtccagcctgggaggtccctgagactctcctgtgtagcgtctggattcaccttcagtagctatggcatgcactgggtccgccaggctccaggcaaggggctggagtgggtggcagttatatggaatgatggaagtaaaaaataccatgtagactccgtgaagggccgatttaccatctccagagacaattccaagaacacgctgtatctgcaaatgaacagcctgagagccgaggacacggctctgtattactgtgcgagagatctggataagaggaactttccttattactactactacggtatggacgtctggggccaagggaccacggtcaccgtctcctca

SEQ ID NO: 31612 - protein, 126 aa, synthetic construct
  REGION 1..126: note = Description of Artificial Sequence: Synthetic polypeptide
QVQLVESGGGVVQPGRSLRLSCVASGFTFSSYGMHWVRQAPGKGLEWVAVIWNDGSKKYHVDSVKGRFTISRDNSKNTLYLQMNSLRAEDTALYYCARDLDKRNFPYYYYYGMDVWGQGTTVTVSS

SEQ ID NO: 31613 - DNA, 375 bp, synthetic construct
  misc_feature 1..375: note = Description of Artificial Sequence: Synthetic polynucleotide
  source 1..375: mol_type = other DNA
caggtgcagctggtggagtctgggggaggcgtggtccagcctgggaggtccctgagactctcctgtgcagcgtctggattcaccttcagtagctatggcatgcactgggtccgccaggctccaggcaaggggctggagtgggtggcagttatatggtttgatggaagtaataaatactatacagactccgtgaagggccgattcaccatctccagagacaattccaagaacacgctgtatctgcaaatgaacagcctgagagccgaggacacggctgtatattattgtgcgagagataactggaactacggcgattactactactactacggtatggacgtctggggccaagggaccacggtcaccgtctcctca

SEQ ID NO: 31614 - protein, 125 aa, synthetic construct
  REGION 1..125: note = Description of Artificial Sequence: Synthetic polypeptide
QVQLVESGGGVVQPGRSLRLSCAASGFTFSSYGMHWVRQAPGKGLEWVAVIWFDGSNKYYTDSVKGRFTISRDNSKNTLYLQMNSLRAEDTAVYYCARDNWNYGDYYYYYGMDVWGQGTTVTVSS

SEQ ID NO: 31615 - DNA, 372 bp, synthetic construct
  misc_feature 1..372: note = Description of Artificial Sequence: Synthetic polynucleotide
  source 1..372: mol_type = other DNA
caggtgcagctggtgcagtctggggctgaggtgaagaagcctggggcctcagtgaaggtctcctgcaaggcttctggatacaccttcaccggctactatatgcactgggtgcgacaggcccctggacaagggcttgagtggatgggatggatcaaccctaacagtggtggcacaaactatgcacagaagtttcagggcagggtcaccatgaccagggacacgtccatcagcacagcctacatggaactgagcaggctgagatctgacgacacggccgtgtattactgtgcgagagatagagcagtggctggaaactacttctactacggtatggacgtctggggccaagggaccacggtcaccgtctcctca

SEQ ID NO: 31616 - protein, 124 aa, synthetic construct
  REGION 1..124: note = Description of Artificial Sequence: Synthetic polypeptide
QVQLVQSGAEVKKPGASVKVSCKASGYTFTGYYMHWVRQAPGQGLEWMGWINPNSGGTNYAQKFQGRVTMTRDTSISTAYMELSRLRSDDTAVYYCARDRAVAGNYFYYGMDVWGQGTTVTVSS

SEQ ID NO: 31617 - DNA, 351 bp, synthetic construct
  misc_feature 1..351: note = Description of Artificial Sequence: Synthetic polynucleotide
  source 1..351: mol_type = other DNA
caggtgcagctggtggagtctgggggaggcgtggtccagcctgggaggtccctgagactctcctgtgcagcctctggattcaacttcagaagctatggcatgcattgggtccgccaggctccaggcaaggggctggagtgggtggcagttataatatatgatggaagttataagtactatgcagactccgtgaagggccgattcaccatctccagagacaattccaagaacacgctgtatctgcaaatgaacagcctgagagctgaggacacggctgtgtattactgtgcgagaacgtatagcgggggtatggacgtctggggccaagggaccacggtcaccgtctcctca

SEQ ID NO: 31618 - protein, 117 aa, synthetic construct
  REGION 1..117: note = Description of Artificial Sequence: Synthetic polypeptide
QVQLVESGGGVVQPGRSLRLSCAASGFNFRSYGMHWVRQAPGKGLEWVAVIIYDGSYKYYADSVKGRFTISRDNSKNTLYLQMNSLRAEDTAVYYCARTYSGGMDVWGQGTTVTVSS

SEQ ID NO: 31619 - DNA, 357 bp, synthetic construct
  misc_feature 1..357: note = Description of Artificial Sequence: Synthetic polynucleotide
  source 1..357: mol_type = other DNA
caggtgcagctggtggagtctgggggagacgtggtccagcctggaaggtccctgagactctcctgtgaagcgtctggattcaccttcagtagctatggcctgcactgggtccgccaggctcccggcaagggactggagtgggtggcagttatatggtatgatggaagtaataaatactatgcagactccgtgaagggccgattcaccatctccagagacaattccaagaacacgctgtatctgcaaatgaacagcctgagagccgaggacacggctgtgtattactgtgcgaactggtactactactactacggtatggacgtctggggccaagggaccacggtcaccgtctcctca

SEQ ID NO: 31620 - protein, 119 aa, synthetic construct
  REGION 1..119: note = Description of Artificial Sequence: Synthetic polypeptide
QVQLVESGGDVVQPGRSLRLSCEASGFTFSSYGLHWVRQAPGKGLEWVAVIWYDGSNKYYADSVKGRFTISRDNSKNTLYLQMNSLRAEDTAVYYCANWYYYYYGMDVWGQGTTVTVSS

SEQ ID NO: 31621 - DNA, 360 bp, synthetic construct
  misc_feature 1..360: note = Description of Artificial Sequence: Synthetic polynucleotide
  source 1..360: mol_type = other DNA
caggtacagttgcagcagtcaggtccaggactggtgaagccctcgcagaccctctcactcacctgtgccatctccggggacagtgtctctaggaaaagtgctacttggaactggatcaggcagtccccatcgagaggccttgagtggctgggaaggacatactacaggtccaagtggtataatgattatgcagtatctgtgaaaagtcgaataatcatcaatccagacacatccaagaaccagttctccctgcagctgaactctgtgactcccgaggacacggctgtgtattactgtgcaagagatccgggtggcctctttgactactggggccagggaaccctggtcaccgtctcctca

SEQ ID NO: 31622 - protein, 120 aa, synthetic construct
  REGION 1..120: note = Description of Artificial Sequence: Synthetic polypeptide
QVQLQQSGPGLVKPSQTLSLTCAISGDSVSRKSATWNWIRQSPSRGLEWLGRTYYRSKWYNDYAVSVKSRIIINPDTSKNQFSLQLNSVTPEDTAVYYCARDPGGLFDYWGQGTLVTVSS

SEQ ID NO: 31623 - DNA, 375 bp, synthetic construct
  misc_feature 1..375: note = Description of Artificial Sequence: Synthetic polynucleotide
  source 1..375: mol_type = other DNA
caggtgcagctggtggagtctgggggaggcgtggtccagcctgggaggtccctgagactctcctgtgcagcgtctggattcaccctcagtaactatggcatgcactgggtccgccaggctccaggcaaggggctggagtgggtggcagttatatggtttggtggagataataaatactatgcagactccgtgaggggccgattcaccatctccagagacaattccaagaacacgctgtatctgcaaatgaacagcctgagagccgaggacacggctgtgttttactgtgcgagagataactggaactacggcgatcactactactattacggaatggacgtctggggccaagggaccacggtcaccgtctcctca

SEQ ID NO: 31624 - protein, 125 aa, synthetic construct
  REGION 1..125: note = Description of Artificial Sequence: Synthetic polypeptide
QVQLVESGGGVVQPGRSLRLSCAASGFTLSNYGMHWVRQAPGKGLEWVAVIWFGGDNKYYADSVRGRFTISRDNSKNTLYLQMNSLRAEDTAVFYCARDNWNYGDHYYYYGMDVWGQGTTVTVSS

SEQ ID NO: 31625 - DNA, 351 bp, synthetic construct; identical to SEQ ID NO: 31603
  misc_feature 1..351: note = Description of Artificial Sequence: Synthetic polynucleotide
  source 1..351: mol_type = other DNA

SEQ ID NO: 31626 - protein, 117 aa, synthetic construct; identical to SEQ ID NO: 31604
  REGION 1..117: note = Description of Artificial Sequence: Synthetic polypeptide

SEQ ID NO: 31627 - DNA, 357 bp, synthetic construct
  misc_feature 1..357: note = Description of Artificial Sequence: Synthetic polynucleotide
  source 1..357: mol_type = other DNA
caggtgcagctgcaggagtcgggcccaggactggtgaagccttcacagaccctgtccctcacctgcactgtctctggtggctccatcagaagtggtggtgactactggagctggatccgccagcacccaggggagggcctggagtggattgggtacatctattacagtgggatcacctactacaatccgtccctcaagagtcgagttaccatatcagtagacacgtctaagaaccagttctccctgaagctgagctctgtgactgccgcggacacggccgtgtattactgtgcgagagatagcagctcgcggggtatggacgtctggggccaagggaccacggtcaccgtctcctca

SEQ ID NO: 31628 - protein, 119 aa, synthetic construct
  REGION 1..119: note = Description of Artificial Sequence: Synthetic polypeptide
QVQLQESGPGLVKPSQTLSLTCTVSGGSIRSGGDYWSWIRQHPGEGLEWIGYIYYSGITYYNPSLKSRVTISVDTSKNQFSLKLSSVTAADTAVYYCARDSSSRGMDVWGQGTTVTVSS

SEQ ID NO: 31629 - DNA, 354 bp, synthetic construct
  misc_feature 1..354: note = Description of Artificial Sequence: Synthetic polynucleotide
  source 1..354: mol_type = other DNA
caggtgcagctgcaggagtcgggcccaggactggtgaagccttcggagaccctgtccctcacctgcactgtctctggtggctccatcagaagttactactggatctggatccggcagcccccagggaagggactggagtggattgggtatatctattacagtgggagtactaagtacaacccctccctcaagagtcgagtcaccatatcagtagacacgtccaagaaccagttctccctgaaactgagctctgtgaccgctgcggacacggccgtgtattactgtgcgagaaagggagtgggaaccatccactttgactactggggccagggaaccctggtcaccgtctcctca

SEQ ID NO: 31630 - protein, 118 aa, synthetic construct
  REGION 1..118: note = Description of Artificial Sequence: Synthetic polypeptide
QVQLQESGPGLVKPSETLSLTCTVSGGSIRSYYWIWIRQPPGKGLEWIGYIYYSGSTKYNPSLKSRVTISVDTSKNQFSLKLSSVTAADTAVYYCARKGVGTIHFDYWGQGTLVTVSS

SEQ ID NO: 31631 - DNA, 357 bp, synthetic construct; identical to SEQ ID NO: 31627
  misc_feature 1..357: note = Description of Artificial Sequence: Synthetic polynucleotide
  source 1..357: mol_type = other DNA

SEQ ID NO: 31632 - protein, 119 aa, synthetic construct; identical to SEQ ID NO: 31628
  REGION 1..119: note = Description of Artificial Sequence: Synthetic polypeptide

SEQ ID NO: 31633 - DNA, 375 bp, synthetic construct
  misc_feature 1..375: note = Description of Artificial Sequence: Synthetic polynucleotide
  source 1..375: mol_type = other DNA
caggtgcagctggtggagtctgggggaggcgtggtccagcctgggaggtccctgagactctcctgtgcagcgtctggattcaccctcagtagctatggcatgcactgggtccgccaggctccaggcaaggggctggagtgggtggcagttatatggtttgatggaagtaataaatactatgcagactccgtgaagggccgattcaccatctccagagacaattccaagaacacgctgtatctgcaaatgaacagcctgagagccgaggacacggctgtgtattactgtgcgagagataactggaactacggcgatcactactactactacggtatggacgtctggggccaagggaccacggtcaccgtctcctca

SEQ ID NO: 31634 - protein, 125 aa, synthetic construct
  REGION 1..125: note = Description of Artificial Sequence: Synthetic polypeptide
QVQLVESGGGVVQPGRSLRLSCAASGFTLSSYGMHWVRQAPGKGLEWVAVIWFDGSNKYYADSVKGRFTISRDNSKNTLYLQMNSLRAEDTAVYYCARDNWNYGDHYYYYGMDVWGQGTTVTVSS

SEQ ID NO: 31635 - DNA, 375 bp, synthetic construct
  misc_feature 1..375: note = Description of Artificial Sequence: Synthetic polynucleotide
  source 1..375: mol_type = other DNA
caggtgcagctggtggagtctgggggaggcgtggtccagcctgggaggtccctgagactctcctgtgcagcgtctggattcaccctcagtaattatggcatgcactgggtccgccaggctccaggcaaggggctggagtgggtggcagttatatggtttggtggagataataaatactatgcagactccgtgaagggccgattcaccatctccagagacaattccaagaacacgctgtatctgcaaatgaacagcctgagagccgaggacacggctgtgttttactgtgcgagagataactggaactacggcgatcactactactattacggtatggacgtctggggccaagggaccacggtcaccgtctcctca

SEQ ID NO: 31636 - protein, 125 aa, synthetic construct
  REGION 1..125: note = Description of Artificial Sequence: Synthetic polypeptide
QVQLVESGGGVVQPGRSLRLSCAASGFTLSNYGMHWVRQAPGKGLEWVAVIWFGGDNKYYADSVKGRFTISRDNSKNTLYLQMNSLRAEDTAVFYCARDNWNYGDHYYYYGMDVWGQGTTVTVSS

SEQ ID NO: 31637 - DNA, 366 bp, synthetic construct
  misc_feature 1..366: note = Description of Artificial Sequence: Synthetic polynucleotide
  source 1..366: mol_type = other DNA
caggtgcagctggtggagtctgggggaggcgtggtccagcctgggaggtccctgagactctcctgtgcagcgtctggattcaccttcagtttccatggcatgcactgggtccgccaggctccaggcaaggggctggagtgggtggcagttatatggtatgatggaagtaaaaaatactatgcagactccgtgaagggccgattcaccatctccagagacaattccaagaacacgctgcatctgcaaatgaacagtctgagagccgaggacacggctgtgtattactgtgcgaaagaagggtatagcagtggcttttacagggggtttgacaactggggccagggaaccctggtcaccgtctcctca

SEQ ID NO: 31638 - protein, 122 aa, synthetic construct
  REGION 1..122: note = Description of Artificial Sequence: Synthetic polypeptide
QVQLVESGGGVVQPGRSLRLSCAASGFTFSFHGMHWVRQAPGKGLEWVAVIWYDGSKKYYADSVKGRFTISRDNSKNTLHLQMNSLRAEDTAVYYCAKEGYSSGFYRGFDNWGQGTLVTVSS

SEQ ID NO: 31639 - DNA, 381 bp, synthetic construct
  misc_feature 1..381: note = Description of Artificial Sequence: Synthetic polynucleotide
  source 1..381: mol_type = other DNA
caggtgcagctggtggagtctgggggaggcgtggtccagcctgggaggtccctgagactctcctgtgcagcgtctggattcaccttcagtacctatggcatgcactgggtccgccaggctccaggcaaggggctggagtgggtgacacttatatggtttgatggaagtaataaatactatgcagactccgtgaagggccgattcaccatctccagagacaattccaagaacacgctgtatctgcaaatgaacagcctgagagccgaggacacggctgtgtattactgtgcgagagatcgggtgggaggtactagtcctccttactactactactacggtatggacgtctggggccaagggaccacggtcaccgtctcctca

SEQ ID NO: 31640 - protein, 127 aa, synthetic construct
  REGION 1..127: note = Description of Artificial Sequence: Synthetic polypeptide
QVQLVESGGGVVQPGRSLRLSCAASGFTFSTYGMHWVRQAPGKGLEWVTLIWFDGSNKYYADSVKGRFTISRDNSKNTLYLQMNSLRAEDTAVYYCARDRVGGTSPPYYYYYGMDVWGQGTTVTVSS

SEQ ID NO: 31641 - DNA, 366 bp, synthetic construct
  misc_feature 1..366: note = Description of Artificial Sequence: Synthetic polynucleotide
  source 1..366: mol_type = other DNA
caggtgcagctggtgcagtctggggctgaggtgaagaagcctggggcctcagtgaaggtctcctgtaaggtttctggatataccttcaccggctacaatatgcactgggtgcgacaggcccctggacaagggcttgagtggatgggatggatcaaccctaatagtggtggcacaaactatgcacacaagtttcagggcagggtcaccatgaccagggacacgtccatcagcacagcctacatggagctgagcaggctgagatctgacgacacggccgtgtattactgtgcgagagatttctatgatagtggtggagaagggtggttcgacccctggggccagggaaccctggtcaccgtctcctca

SEQ ID NO: 31642 - protein, 122 aa, synthetic construct
  REGION 1..122: note = Description of Artificial Sequence: Synthetic polypeptide
QVQLVQSGAEVKKPGASVKVSCKVSGYTFTGYNMHWVRQAPGQGLEWMGWINPNSGGTNYAHKFQGRVTMTRDTSISTAYMELSRLRSDDTAVYYCARDFYDSGGEGWFDPWGQGTLVTVSS

SEQ ID NO: 31643 - DNA, 378 bp, synthetic construct
  misc_feature 1..378: note = Description of Artificial Sequence: Synthetic polynucleotide
  source 1..378: mol_type = other DNA
caggtgcagctggtggagtctgggggaggcgtggtccagcctgggaggtccctgagactctcctgtgcagcgtctggattcaccttcagtagctatggcatgcactgggtccgccaggctccaggcaaggggctggagtgggtgacagttatatggaatgatggaagtaataaatactatgcagactccgtgaagggccgatttaccatctccagagacaattccaagaacacgctgtatctgcaaatgaacagcctgagagccgaggacacggctctgtattactgtgcgagagatctggataagaggaactttccttattactactactacggtatggacgtctggggccaagggaccacggtcaccgtctcctca

SEQ ID NO: 31644 - protein, 126 aa, synthetic construct
  REGION 1..126: note = Description of Artificial Sequence: Synthetic polypeptide
QVQLVESGGGVVQPGRSLRLSCAASGFTFSSYGMHWVRQAPGKGLEWVTVIWNDGSNKYYADSVKGRFTISRDNSKNTLYLQMNSLRAEDTALYYCARDLDKRNFPYYYYYGMDVWGQGTTVTVSS

SEQ ID NO: 31645 - DNA, 357 bp, synthetic construct
  misc_feature 1..357: note = Description of Artificial Sequence: Synthetic polynucleotide
  source 1..357: mol_type = other DNA
caggtgcagctgcaggagtcgggcccaggactggtgaagccttcacagaccctgtccctcacctgcactgtctctggtggctccatcagcagtggtggttactactggagctggatccgccagcccccagggaagggcctggagtggattgggtacatctattacactgggagcacctactacaacccgtccctcaagagtcgagttaccatatcagtagacacgtctaagaaccagttctccctgaagctgagctctgtgactgccgcggacacggccgtgtattactgtgcgagagacgatcccctctacggaatggacgtctggggccaagggaccacggtcaccgtctcctca

SEQ ID NO: 31646 - protein, 119 aa, synthetic construct
  REGION 1..119: note = Description of Artificial Sequence: Synthetic polypeptide
QVQLQESGPGLVKPSQTLSLTCTVSGGSISSGGYYWSWIRQPPGKGLEWIGYIYYTGSTYYNPSLKSRVTISVDTSKNQFSLKLSSVTAADTAVYYCARDDPLYGMDVWGQGTTVTVSS

SEQ ID NO: 31647 - DNA, 342 bp, synthetic construct
  misc_feature 1..342: note = Description of Artificial Sequence: Synthetic polynucleotide
  source 1..342: mol_type = other DNA
caggtgcagctgcaggagtcgggcccaggactggtgaagccgtcggagaccctgtccctcacctgcactgtctctggtggctccatcagtaattactactggagctggatccggcagcccgccgggaagggactggagtggattgggcggatctattccagtgggagcaccaactacaacccctccctcaagagtcgagtcaccatgtcagtagacacgtccaagaaccagttctccctgaagctgaactctgtgaccgccgcggacacggccgtgtattactgtgcgaaagggtgggagctaaactactggggccagggaaccctggtcaccgtctcctca

SEQ ID NO: 31648 - protein, 114 aa, synthetic construct
  REGION 1..114: note = Description of Artificial Sequence: Synthetic polypeptide
QVQLQESGPGLVKPSETLSLTCTVSGGSISNYYWSWIRQPAGKGLEWIGRIYSSGSTNYNPSLKSRVTMSVDTSKNQFSLKLNSVTAADTAVYYCAKGWELNYWGQGTLVTVSS

SEQ ID NO: 31649 - DNA, 357 bp, synthetic construct
  misc_feature 1..357: note = Description of Artificial Sequence: Synthetic polynucleotide
  source 1..357: mol_type = other DNA
caggtgcagctgcaggagtcgggcccaggactggtgaagccttcacagaccctgtccctcacctgcactgtctctggtggctccatcagcagtggtggttactactggagctggatccgccagcacccagggaagggcctggagtggattgggtacatctattacagagggagtacctactacaatccgtccctcaagagtcgagttaccatatcagtggacacgtctaagaaccagttctccctgaaactgaactctgtgactgccgcggacacggccgtgtattactgtgcgagagactccccggtgacaggatttgactattggggccagggaatcctggtcaccgtctcctca

SEQ ID NO: 31650 - protein, 119 aa, synthetic construct
  REGION 1..119: note = Description of Artificial Sequence: Synthetic polypeptide
QVQLQESGPGLVKPSQTLSLTCTVSGGSISSGGYYWSWIRQHPGKGLEWIGYIYYRGSTYYNPSLKSRVTISVDTSKNQFSLKLNSVTAADTAVYYCARDSPVTGFDYWGQGILVTVSS

SEQ ID NO: 31651 - DNA, 357 bp, synthetic construct
  misc_feature 1..357: note = Description of Artificial Sequence: Synthetic polynucleotide
  source 1..357: mol_type = other DNA
caggtgcagctgcaggagtcgggcccaggagtggtgaagccttcacagaccctgtccctcacctgcactgtctctggtggctccatcagcagtggtggtgactactggagctggatccgccagcacccagggaagggcctggagtggattgggtacatctattacagtgggcccacctactacaacccgtccctcaagagtcgacttaccatgtcagcagacacgtctaagaaccagttctccctgaagctgagctctgtgactgccgcggacacggccgtgtattactgtgcgagagatagctccctctacggtatggacgtctggggccaagggacaacggtcaccgtctcctca

SEQ ID NO: 31652 - protein, 119 aa, synthetic construct
  REGION 1..119: note = Description of Artificial Sequence: Synthetic polypeptide
QVQLQESGPGVVKPSQTLSLTCTVSGGSISSGGDYWSWIRQHPGKGLEWIGYIYYSGPTYYNPSLKSRLTMSADTSKNQFSLKLSSVTAADTAVYYCARDSSLYGMDVWGQGTTVTVSS

SEQ ID NO: 31653 - DNA, 342 bp, synthetic construct
  misc_feature 1..342: note = Description of Artificial Sequence: Synthetic polynucleotide
  source 1..342: mol_type = other DNA
caggtgcagctgcaggagtcgggcccaggactggtgaagccttcggagaccctgtccctcacctgcactgtctctggtggctccatcagtagttactactggagctggatccggcagcccccagggaagggactggagtggattgggtatatctattacagtgggagcaccaactacaacccctccctcaagagtcgagtcaccatatcagtagacacgtccaagaaccagttctccctgaagctgagctctgtgaccgctgcggacacggccgtgtattactgtgcgggaggatgggagctaaactactggggccagggaaccctggtcaccgtctcctca

SEQ ID NO: 31654 - protein, 114 aa, synthetic construct
  REGION 1..114: note = Description of Artificial Sequence: Synthetic polypeptide
QVQLQESGPGLVKPSETLSLTCTVSGGSISSYYWSWIRQPPGKGLEWIGYIYYSGSTNYNPSLKSRVTISVDTSKNQFSLKLSSVTAADTAVYYCAGGWELNYWGQGTLVTVSS

SEQ ID NO: 31655 - DNA, 357 bp, synthetic construct
  misc_feature 1..357: note = Description of Artificial Sequence: Synthetic polynucleotide
  source 1..357: mol_type = other DNA
gaggtgcagctggtggagtctgggggaggcttggtaatgcctggggggtcccttagcctctcctgtgcagcctctggattcactttcagtaacgcctacatgacctgggtccgccaggctccagggaaggggctggagtgggttggccgtattaaaagcaaaactgatggtgggacaacagactacgctgcacccgtgaaaggcagattcaccatctcaagagatgattcaaaaaacacgctgtatctgcaaatgaacagcctgaaaaccgaggacacagccgtgtattactgtaccacagatcccggtggtatctttgactactggggccagggaaccctggtcaccgtctcctca

SEQ ID NO: 31656 - protein, 119 aa, synthetic construct
  REGION 1..119: note = Description of Artificial Sequence: Synthetic polypeptide
EVQLVESGGGLVMPGGSLSLSCAASGFTFSNAYMTWVRQAPGKGLEWVGRIKSKTDGGTTDYAAPVKGRFTISRDDSKNTLYLQMNSLKTEDTAVYYCTTDPGGIFDYWGQGTLVTVSS

SEQ ID NO: 31657 - DNA, 372 bp, synthetic construct; identical to SEQ ID NO: 28197
  misc_feature 1..372: note = Description of Artificial Sequence: Synthetic polynucleotide
  source 1..372: mol_type = other DNA

SEQ ID NO: 31658 - protein, 124 aa, synthetic construct; identical to SEQ ID NO: 28198
  REGION 1..124: note = Description of Artificial Sequence: Synthetic polypeptide

SEQ ID NO: 31659 - DNA, 357 bp, synthetic construct
  misc_feature 1..357: note = Description of Artificial Sequence: Synthetic polynucleotide
  source 1..357: mol_type = other DNA
caggtgcagctgcaggagtcgggcccaggactggtgaagccttcacagaccctgtccctcatctgcactgtctctggtggctccatcagaagtggtggtgactactggagctggatccgccagcacccagggaagggcctggagtggattgggtacatctattacagtgggagcacctactacaacccgtctctcaagagtcgagttaccatatcagtagacacgtctaagaaccagttctccctgaagctgagctctgtgactgccgcggacacggccgtttattactgtgcgagagatcactccctctacggtatggacgtctggggccaagggaccacggtcaccgtctcctca

SEQ ID NO: 31660 - protein, 119 aa, synthetic construct
  REGION 1..119: note = Description of Artificial Sequence: Synthetic polypeptide
QVQLQESGPGLVKPSQTLSLICTVSGGSIRSGGDYWSWIRQHPGKGLEWIGYIYYSGSTYYNPSLKSRVTISVDTSKNQFSLKLSSVTAADTAVYYCARDHSLYGMDVWGQGTTVTVSS

SEQ ID NO: 31661 - DNA, 378 bp, synthetic construct
  misc_feature 1..378: note = Description of Artificial Sequence: Synthetic polynucleotide
  source 1..378: mol_type = other DNA
caggtgcagctggtggagtctgggggaggcgtggtccagcctgggaggtccctgagactctcctgtgcagcgtctggattcaccttcagtagctatggcatgcactgggtccgccaggctccaggcaaggggctggagtgggtggcagttatatggaatgatggaagtaaaaaataccatgtagactccgtgaagggccgatttaccatctccagagacaattccaagaacacgctgtatctgcaaatgaacagcctgagagccgaggacacggctctgtattactgtgcgagagatctggataagaggaactttccttattactactactacggtatggacgtctggggccaagggaccacggtcaccgtctcctca

SEQ ID NO: 31662 - protein, 126 aa, synthetic construct
  REGION 1..126: note = Description of Artificial Sequence: Synthetic polypeptide
QVQLVESGGGVVQPGRSLRLSCAASGFTFSSYGMHWVRQAPGKGLEWVAVIWNDGSKKYHVDSVKGRFTISRDNSKNTLYLQMNSLRAEDTALYYCARDLDKRNFPYYYYYGMDVWGQGTTVTVSS

SEQ ID NO: 31663 - DNA, 357 bp, synthetic construct
  misc_feature 1..357: note = Description of Artificial Sequence: Synthetic polynucleotide
  source 1..357: mol_type = other DNA
caggtgcagctgcaggagtcgggcccaggactggtgaagccttcacagaccctgtccctcacctgcactgtctctggtggctccatcagcagtggtggtgactactggagctggatccgccagcacccagggaagggcctggagtggattgggtacatctattacagtgggagtacctactacaacccgtccctcaagagtcgagttaccatatcagtagacacgtctaagaaccagttctccctgaagctgagctctgtgactgccgcggacacggccgtgtattactgtgcgagagatggggctcggcacggtatggacgtctggggccaagggaccacggtcaccgtctcctca

SEQ ID NO: 31664 - protein, 119 aa, synthetic construct
  REGION 1..119: note = Description of Artificial Sequence: Synthetic polypeptide
QVQLQESGPGLVKPSQTLSLTCTVSGGSISSGGDYWSWIRQHPGKGLEWIGYIYYSGSTYYNPSLKSRVTISVDTSKNQFSLKLSSVTAADTAVYYCARDGARHGMDVWGQGTTVTVSS

SEQ ID NO: 31665 - DNA, 378 bp, synthetic construct; identical to SEQ ID NO: 31643
  misc_feature 1..378: note = Description of Artificial Sequence: Synthetic polynucleotide
  source 1..378: mol_type = other DNA

SEQ ID NO: 31666 - protein, 126 aa, synthetic construct; identical to SEQ ID NO: 31644
  REGION 1..126: note = Description of Artificial Sequence: Synthetic polypeptide

SEQ ID NO: 31667 - DNA, 357 bp, synthetic construct
  misc_feature 1..357: note = Description of Artificial Sequence: Synthetic polynucleotide
  source 1..357: mol_type = other DNA
caggtgcagctggtggagtctgggggaggcttggtcaagcctggagggtccctgagactctcctgtgcagcctctggattcaccttcagtgactactacatgagctggatccgccaggctccagggaaggggctggagtgggtttcatatattactagtagtggtaataccatatactacgcagactctgtgaagggccgattcaccatctccagggacaacgccaagaactcactgtatctgcaaatgaacagcctgagagccgaggacacggccgtatattactgtgcgagagatagtcgatattttgactggtttgactactggggccagggaaccctggtcaccgtctcttca

SEQ ID NO: 31668 - protein, 119 aa, synthetic construct
  REGION 1..119: note = Description of Artificial Sequence: Synthetic polypeptide
QVQLVESGGGLVKPGGSLRLSCAASGFTFSDYYMSWIRQAPGKGLEWVSYITSSGNTIYYADSVKGRFTISRDNAKNSLYLQMNSLRAEDTAVYYCARDSRYFDWFDYWGQGTLVTVSS

SEQ ID NO: 31669 - DNA, 342 bp, synthetic construct
  misc_feature 1..342: note = Description of Artificial Sequence: Synthetic polynucleotide
  source 1..342: mol_type = other DNA
caggtgcagctgcaggagtcgggcccaggactggtgaagccttcggagaccctgtccctcacctgcactgtctctggtggctccatcaggaattactactggagctggatccggcagcccgccgggaagggactggagtggattgggcgtatctatagcagtgggagcaccaactacaacccctccctcaagagtcgagtctccatgtcagtagacacgtccaagaaccagttctccctgaagctgagttctgtgaccgccgcggacacggccgtgtattactgtacgagagggtgggagctaaacaactggggccagggaaccctggtcaccgtctcctca

SEQ ID NO: 31670 - protein, 114 aa, synthetic construct
  REGION 1..114: note = Description of Artificial Sequence: Synthetic polypeptide
QVQLQESGPGLVKPSETLSLTCTVSGGSIRNYYWSWIRQPAGKGLEWIGRIYSSGSTNYNPSLKSRVSMSVDTSKNQFSLKLSSVTAADTAVYYCTRGWELNNWGQGTLVTVSS

SEQ ID NO: 31671 - DNA, 372 bp, synthetic construct
  misc_feature 1..372: note = Description of Artificial Sequence: Synthetic polynucleotide
  source 1..372: mol_type = other DNA
caggtgcaggtggtgcagtctggggctgaggtgaagaagcctggggcctcagtgaaggtctcctgcaaggcttctggatacaccttcaccggctactatatgcactgggtgcgacaggcccctggacaagggcttgagtggatgggatggatcaaccctaacagtggtgccacaaactatgcacagaagtttcagggcagggtcaccatgaccagggacacgtccatcagcacagcctacatggagctgaacaggctgagatctgacgacacggccgtgtattactgtgcgagagcctattactatggttcggggacttattataacgagttcgactactggggccagggaaccctggtcaccgtctcctca

SEQ ID NO: 31672 - protein, 124 aa, synthetic construct
  REGION 1..124: note = Description of Artificial Sequence: Synthetic polypeptide
QVQVVQSGAEVKKPGASVKVSCKASGYTFTGYYMHWVRQAPGQGLEWMGWINPNSGATNYAQKFQGRVTMTRDTSISTAYMELNRLRSDDTAVYYCARAYYYGSGTYYNEFDYWGQGTLVTVSS

SEQ ID NO: 31673 - DNA, 372 bp, synthetic construct
  misc_feature 1..372: note = Description of Artificial Sequence: Synthetic polynucleotide
  source 1..372: mol_type = other DNA
caggtgcagctggtgcagtctggggctgaggtgaagaagcctggggcctcagtgaaggtctcctgcaaggcttctggatacaccttcaccggctactatatgcactgggtgcgacaggcccctggacaagggcttgagtggatgggatggatcaacccttacagtggtggcacaaactatgcacagaagtttcaggacagggtcaccatgaccagggacacgtccatcaccacagcctacatggaactgagcaggctgagatctgacgacacggccgtgtattactgtgcgagagatagagcagtggctggaaactacttctactacggtatggacgtctggggccaggggaccacggtcaccgtctcctca

SEQ ID NO: 31674 - protein, 124 aa, synthetic construct
  REGION 1..124: note = Description of Artificial Sequence: Synthetic polypeptide
QVQLVQSGAEVKKPGASVKVSCKASGYTFTGYYMHWVRQAPGQGLEWMGWINPYSGGTNYAQKFQDRVTMTRDTSITTAYMELSRLRSDDTAVYYCARDRAVAGNYFYYGMDVWGQGTTVTVSS

SEQ ID NO: 31675 - DNA, 366 bp, synthetic construct
  misc_feature 1..366: note = Description of Artificial Sequence: Synthetic polynucleotide
  source 1..366: mol_type = other DNA
caggtgcagctggtgcagtctggggctgaggtgaagaagcctggggcctcagtgaaggtctcctgtaaggtttctggatataccttcaccggctacaatatgcactgggtgcgacaggcccctggacaagggcttgagtggatgggatggatcaaccctaatagtggtggcacaaactatgcacacaagtttcagggcagggtcaccatgaccagggacacgtccatcagcacagcctacatggaactgagcaggctgagatccgacgacacggccgtgtattactgtgcgagagattactatgatactagtggagaagggtggttcgacccctggggccagggaaccctggtcaccgtctcctca

SEQ ID NO: 31676 - protein, 122 aa, synthetic construct
  REGION 1..122: note = Description of Artificial Sequence: Synthetic polypeptide
QVQLVQSGAEVKKPGASVKVSCKVSGYTFTGYNMHWVRQAPGQGLEWMGWINPNSGGTNYAHKFQGRVTMTRDTSISTAYMELSRLRSDDTAVYYCARDYYDTSGEGWFDPWGQGTLVTVSS

SEQ ID NO: 31677 - DNA, 372 bp, synthetic construct
  misc_feature 1..372: note = Description of Artificial Sequence: Synthetic polynucleotide
  source 1..372: mol_type = other DNA
caggtgcagctgctgcagtctggggctgaggtgaggaagcctggggcctcagtgagggtctcctgcaaggcttctggatacaccttcaccggctactatatacactgggtgcgacaggcccctggacaagggcttgagtggatgggatggatcaaccctaacagtggtggcacaaactatgcacagaggtttcagggcagggtcaccatgaccagggacacgtccatcagcacagcctacatggagctgagcaggctgagatctgacgacacggccgtgtattactgtgcgagagagatagcagtggctgggaactacttctactacggtatgggcgtctggggccaagggaccacggtcgccgtctcctca

SEQ ID NO: 31678 - protein, 124 aa, synthetic construct
  REGION 1..124: note = Description of Artificial Sequence: Synthetic polypeptide
QVQLLQSGAEVRKPGASVRVSCKASGYTFTGYYIHWVRQAPGQGLEWMGWINPNSGGTNYAQRFQGRVTMTRDTSISTAYMELSRLRSDDTAVYYCAREIAVAGNYFYYGMGVWGQGTTVAVSS

SEQ ID NO: 31679 - DNA, 372 bp, synthetic construct
  misc_feature 1..372: note = Description of Artificial Sequence: Synthetic polynucleotide
  source 1..372: mol_type = other DNA
caggtgcagctgcaggagtcgggcccaggactggtgaagccttcggagaccctgtccctcacctgcactgtctctggtggctccatcagaatttactactggagctggatccggcagcccccagggaagggactggagtggattgggtatgtctattacagtgggagcaccacctacaacccctccctcaagagtcgagtcaccatatcagtagacacgtccaagaaccagttctccctgaagctgaactctgtgaccgctgcggacacggccgtgtattactgtgtgagagaaagggggagtagccacagatggggggactactacggaatggacgtctggggccgagggaccacggtcaccgtctcctca

SEQ ID NO: 31680 - protein, 124 aa, synthetic construct
  REGION 1..124: note = Description of Artificial Sequence: Synthetic polypeptide
QVQLQESGPGLVKPSETLSLTCTVSGGSIRIYYWSWIRQPPGKGLEWIGYVYYSGSTTYNPSLKSRVTISVDTSKNQFSLKLNSVTAADTAVYYCVRERGSSHRWGDYYGMDVWGRGTTVTVSS

SEQ ID NO: 31681 - DNA, 357 bp, synthetic construct; identical to SEQ ID NO: 31645
  misc_feature 1..357: note = Description of Artificial Sequence: Synthetic polynucleotide
  source 1..357: mol_type = other DNA

SEQ ID NO: 31682 - protein, 119 aa, synthetic construct; identical to SEQ ID NO: 31646
  REGION 1..119: note = Description of Artificial Sequence: Synthetic polypeptide

SEQ ID NO: 31683 - DNA, 366 bp, synthetic construct
  misc_feature 1..366: note = Description of Artificial Sequence: Synthetic polynucleotide
  source 1..366: mol_type = other DNA
caggtgcagctggtgcagtctggggctgaggtgaagaagcctggggcctcagtgaaggtctcctgtaaggtttctggatataccttcaccggctacaatatgcactgggtgcgacaggcccctggacaagggcttgagtggatgggatggatcaaccctaatagtggtggcacaaactatgcacacaagtttcagggcagggtcaccatgaccagggacacgtccatcagcacagcctacatggagctgagcaggctgagatctgacgacacggccgtgtattactgtgcgagagattactatgatagtagtggagaagggtggttcgacccctggggccagggaaccctggtcaccgtctcctca

SEQ ID NO: 31684 - protein, 122 aa, synthetic construct
  REGION 1..122: note = Description of Artificial Sequence: Synthetic polypeptide
QVQLVQSGAEVKKPGASVKVSCKVSGYTFTGYNMHWVRQAPGQGLEWMGWINPNSGGTNYAHKFQGRVTMTRDTSISTAYMELSRLRSDDTAVYYCARDYYDSSGEGWFDPWGQGTLVTVSS

SEQ ID NO: 31685 - DNA, 366 bp, synthetic construct
  misc_feature 1..366: note = Description of Artificial Sequence: Synthetic polynucleotide
  source 1..366: mol_type = other DNA
caggtgcagctggtggagtctgggggaggcgtggtccagcctgggaggtccctgagactctcctgtgcagcgtctggattcacctttagtttccatggcatgcactgggtccgccaggctccaggcaaggggctggagtgggtggcagttatatggtatgatggaagtaaaaaatactatgcagactccgtgaagggccgattcaccatctccagagacaattccaagaacacgctgcatctgcaaatgaacagtctgagagccgaggacacggctgtgtattactgtgcgaaagaagggtttagcagtggcttttacagggggtttgacaactggggccagggaaccctggtcaccgtctcctca

SEQ ID NO: 31686 - protein, 122 aa, synthetic construct
  REGION 1..122: note = Description of Artificial Sequence: Synthetic polypeptide
QVQLVESGGGVVQPGRSLRLSCAASGFTFSFHGMHWVRQAPGKGLEWVAVIWYDGSKKYYADSVKGRFTISRDNSKNTLHLQMNSLRAEDTAVYYCAKEGFSSGFYRGFDNWGQGTLVTVSS

SEQ ID NO: 31687 - DNA, 357 bp, synthetic construct; identical to SEQ ID NO: 31627
  misc_feature 1..357: note = Description of Artificial Sequence: Synthetic polynucleotide
  source 1..357: mol_type = other DNA

SEQ ID NO: 31688 - protein, 119 aa, synthetic construct; identical to SEQ ID NO: 31628
  REGION 1..119: note = Description of Artificial Sequence: Synthetic polypeptide

SEQ ID NO: 31689 - DNA, 366 bp, synthetic construct
  misc_feature 1..366: note = Description of Artificial Sequence: Synthetic polynucleotide
  source 1..366: mol_type = other DNA
caggtgcagctggtggagtctgggggaggcgtggtccagcctgggaggtccctgagactctcctgtgcagcgtctggattcaccttcagtttctatggcatgcactgggtccgccaggctccaggcaaggggctggagtgggtggcagttatttggtatgatggaagtagtaaatactatgcagactccgtgaagggccgattcaccgtctccagagacaattccaagaacacgctgtatctgcaaatgaacagcctgagagccgaggacacggctgtgtattattgtgcgaaagaagggtatagcagtggcttttacaggggatttgccaactggggccagggaaccctggtcaccgtctcctca

SEQ ID NO: 31690 - protein, 122 aa, synthetic construct
  REGION 1..122: note = Description of Artificial Sequence: Synthetic polypeptide
QVQLVESGGGVVQPGRSLRLSCAASGFTFSFYGMHWVRQAPGKGLEWVAVIWYDGSSKYYADSVKGRFTVSRDNSKNTLYLQMNSLRAEDTAVYYCAKEGYSSGFYRGFANWGQGTLVTVSS

SEQ ID NO: 31691 - DNA, 372 bp, synthetic construct
  misc_feature 1..372: note = Description of Artificial Sequence: Synthetic polynucleotide
  source 1..372: mol_type = other DNA
caggtgcagctgcaggagtcgggcccaggactggtgaagccttcggagaccctgtccctcacctgcactgtctctggtggctccatcagaatttactactggagctggatccggcagaccccagggaagggactggagtggattggatatatctattacagtgggagcaccacctacaacccctccctcaagagtcgagtcaccatatcagtagacacgtccaagaaccagttctccctgaagctgaactctgtgaccgctgcggacacggccgtgtattactgtgtgagagaaagggggagtagccacagatggggggactactacggaatggacgtctggggccgagggaccacggtcaccgtctcctca

SEQ ID NO: 31692 - protein, 124 aa, synthetic construct
  REGION 1..124: note = Description of Artificial Sequence: Synthetic polypeptide
QVQLQESGPGLVKPSETLSLTCTVSGGSIRIYYWSWIRQTPGKGLEWIGYIYYSGSTTYNPSLKSRVTISVDTSKNQFSLKLNSVTAADTAVYYCVRERGSSHRWGDYYGMDVWGRGTTVTVSS

SEQ ID NO: 31693 - DNA, 357 bp, synthetic construct
  misc_feature 1..357: note = Description of Artificial Sequence: Synthetic polynucleotide
  source 1..357: mol_type = other DNA
caggtgcagctgcaggagtcgggcccaggactggtgaagccttcacagaccctgtccctcacctgcactgtctctggtggctccatcagcagtggtggtgactattggagctggatccgccagcacccagggaagggcctggagtggattgggtacatctattatagtgggagcacctactacaacccgtccctcaagagtcgagttaccatatcagtagacacgtctaagaaccagttctccctgaagctgaactctgtgactgccgcggacacggccgtgtattactgtgcgagagatggagcagctctgggtatggacgtctggggccaagggaccacggtcaccgtctcctca

SEQ ID NO: 31694 - protein, 119 aa, synthetic construct
  REGION 1..119: note = Description of Artificial Sequence: Synthetic polypeptide
QVQLQESGPGLVKPSQTLSLTCTVSGGSISSGGDYWSWIRQHPGKGLEWIGYIYYSGSTYYNPSLKSRVTISVDTSKNQFSLKLNSVTAADTAVYYCARDGAALGMDVWGQGTTVTVSS

SEQ ID NO: 31695 - DNA, 354 bp, synthetic construct
  misc_feature 1..354: note = Description of Artificial Sequence: Synthetic polynucleotide
  source 1..354: mol_type = other DNA
caggtgcagctgcaggagtcgggcccaggactggtgaagccttcggagaccctgtccctcacctgcactgtctctggtggctccatcagaagttactactggagctggatccggcagcccccagggaagggactggagtggattgggtatatctattacagtgggagtactaagtacaacccctccctcaagagtcgagtcaccatatcagtagacacgtccaagaaccagttctccctgaaactgagctctgtgaccgctgcggacacggccgtgtactactgtgcgagaaagggagtgggaaccatccactttgactactggggccagggaaccctggtcaccgtctcctca

SEQ ID NO: 31696 - protein, 118 aa, synthetic construct
  REGION 1..118: note = Description of Artificial Sequence: Synthetic polypeptide
QVQLQESGPGLVKPSETLSLTCTVSGGSIRSYYWSWIRQPPGKGLEWIGYIYYSGSTKYNPSLKSRVTISVDTSKNQFSLKLSSVTAADTAVYYCARKGVGTIHFDYWGQGTLVTVSS

SEQ ID NO: 31697 - DNA, 357 bp, synthetic construct
  misc_feature 1..357: note = Description of Artificial Sequence: Synthetic polynucleotide
  source 1..357: mol_type = other DNA
caggtgcagctgcaggagtcgggcccaggactggtgaagccttcacagaccctgtccctcacctgcactgtctctggtggctccatcagcagtggtggtgactactggagctggatccgccagcacccagggaagggcctggagtggattgggtacatctattacagtgggagcacctactacaacccgtccctcaagagtcgagttaccatatcagtagacacgtctaagaaccagttctccctgaagctgaactctgtgactgccgcggacacggccgtgtattactgtgcgagagatggagcagctctgggtatggacgtctggggccaagggaccacggtcaccgtctcctca

SEQ ID NO: 31698 - protein, 119 aa, synthetic construct; identical to SEQ ID NO: 31694
  REGION 1..119: note = Description of Artificial Sequence: Synthetic polypeptide

SEQ ID NO: 31699 - DNA, 357 bp, synthetic construct
  misc_feature 1..357: note = Description of Artificial Sequence: Synthetic polynucleotide
  source 1..357: mol_type = other DNA
caggtgcagctgcaggagtcgggcccaggactggtgaagccttcacagaccctgtccctcacctgcactgtctctggtggctccatcagcagtggtggtgactactggagctggatccgccagcacccagggaagggcctggagtggattgggtacatctattacagagggagcacctactacaacccgtccctcaagagtcgagttaccatatcagtagacacgtctaagaaccagttctccctgaagctgagctctgtgactgccgcggacacggccgtgtattactgtgcgagagatgcagcagcccacggcatggacgtctggggccaagggaccacggtcaccgtctcctca

SEQ ID NO: 31700 - protein, 119 aa, synthetic construct
  REGION 1..119: note = Description of Artificial Sequence: Synthetic polypeptide
QVQLQESGPGLVKPSQTLSLTCTVSGGSISSGGDYWSWIRQHPGKGLEWIGYIYYRGSTYYNPSLKSRVTISVDTSKNQFSLKLSSVTAADTAVYYCARDAAAHGMDVWGQGTTVTVSS

SEQ ID NO: 31701 - DNA, 360 bp, synthetic construct
  misc_feature 1..360: note = Description of Artificial Sequence: Synthetic polynucleotide
  source 1..360: mol_type = other DNA
caggtacagctgcagcagtcaggtccaggactggtgaagccctcgcagaccctctcactcacctgtgccatctccggggacagtgtctctcgcatcaatcctacttggaactggatcaggcagtccccatcgagaggccttgagtggctgggaaggacatactacaggtccaagtggtatcatgtttatgcagtatctgtgaaaagtcgaataaccatcaacccagacacatccaagaaccagttctccctgcagctgaattctgtgactcccgaggacacggcagtgtattactgtgcaagagatcctggggggctctttgactactggggccagggaaccctggtcaccgtctcctca

SEQ ID NO: 31702 - protein, 120 aa, synthetic construct
  REGION 1..120: note = Description of Artificial Sequence: Synthetic polypeptide
QVQLQQSGPGLVKPSQTLSLTCAISGDSVSRINPTWNWIRQSPSRGLEWLGRTYYRSKWYHVYAVSVKSRITINPDTSKNQFSLQLNSVTPEDTAVYYCARDPGGLFDYWGQGTLVTVSS

SEQ ID NO: 31703 - DNA, 354 bp, synthetic construct
  misc_feature 1..354: note = Description of Artificial Sequence: Synthetic polynucleotide
  source 1..354: mol_type = other DNA
caggtgcagctggtggagtctgggggaggcgtggtccagccggggaggtccctgagactctcctgtgcagcgtctggattcaccttcagtaactatggcatgcactgggtccgccaggctccaggcaaggggctggagtgggtggcaattatatggtttgatggaagtaatgaatactatgcagactccgtgaagggccgattcaccatctccagagacaattccatgagcacgctgtatctgcaaatgaacagcctgagagccgaggacacggctgtgtattactgtgcgagagaaagtgggagctatgctctttatatctggggccaagggacaatggtcaccgtctcttca

SEQ ID NO: 31704 - protein, 118 aa, synthetic construct
  REGION 1..118: note = Description of Artificial Sequence: Synthetic polypeptide
QVQLVESGGGVVQPGRSLRLSCAASGFTFSNYGMHWVRQAPGKGLEWVAIIWFDGSNEYYADSVKGRFTISRDNSMSTLYLQMNSLRAEDTAVYYCARESGSYALYIWGQGTMVTVSS

SEQ ID NO: 31705 - DNA, 360 bp, synthetic construct
  misc_feature 1..360: note = Description of Artificial Sequence: Synthetic polynucleotide
  source 1..360: mol_type = other DNA
caggttcagctgcagcagtcaggtccaggactggtgaagccctcgcagaccctctcactcacctgtgccatctccggggacagtgtctctcgcaccaatcctacttggaactggatcaggcagtccccatcgagaggccttgagtggctgggaaggacatactacaggtccaagtggtatcatgtttatgcactatctgtgaaaagtcgaataaccatcaccccagacacatccaagaaccagttctccctgcagctgaactctgtgactcccgaggacacggctgtgtattactgtgcaagagatcctgggggcctctttgactactggggccagggaaccctggtcaccgtctcctca

SEQ ID NO: 31706 - protein, 120 aa, synthetic construct
  REGION 1..120: note = Description of Artificial Sequence: Synthetic polypeptide
QVQLQQSGPGLVKPSQTLSLTCAISGDSVSRTNPTWNWIRQSPSRGLEWLGRTYYRSKWYHVYALSVKSRITITPDTSKNQFSLQLNSVTPEDTAVYYCARDPGGLFDYWGQGTLVTVSS

SEQ ID NO: 31707 - DNA, 354 bp, synthetic construct; identical to SEQ ID NO: 31703
  misc_feature 1..354: note = Description of Artificial Sequence: Synthetic polynucleotide
  source 1..354: mol_type = other DNA

SEQ ID NO: 31708 - protein, 118 aa, synthetic construct; identical to SEQ ID NO: 31704
  REGION 1..118: note = Description of Artificial Sequence: Synthetic polypeptide

SEQ ID NO: 31709 - DNA, 354 bp, synthetic construct
  misc_feature 1..354: note = Description of Artificial Sequence: Synthetic polynucleotide
  source 1..354: mol_type = other DNA
caggtgcagctggtggagtccgggggaggcgtggtccagcctgggaggtccctgagactctcctgtgcagcgtctggattcaccttcagtagctatggcatgcactgggtccgccaggctccaggcaaggggctggagtgggtggcagttatatggtatgatggaagtaataaatactatgcagactccgtgaagggccgattcaccatctccagagacaattccaagaacacgctgtatctgcaaatgaacagcctgagagccgaggacacggctgtgtataactgtgcgagagagggtgggagctaccaccttgactactggggccagggaatcctggtcaccgtctcctca

SEQ ID NO: 31710 - protein, 118 aa, synthetic construct
  REGION 1..118: note = Description of Artificial Sequence: Synthetic polypeptide
QVQLVESGGGVVQPGRSLRLSCAASGFTFSSYGMHWVRQAPGKGLEWVAVIWYDGSNKYYADSVKGRFTISRDNSKNTLYLQMNSLRAEDTAVYNCAREGGSYHLDYWGQGILVTVSS

SEQ ID NO: 31711 - DNA, 354 bp, synthetic construct
  misc_feature 1..354: note = Description of Artificial Sequence: Synthetic polynucleotide
  source 1..354: mol_type = other DNA
gaggtgcagctggtggagtctgggggaggcttggtacagcctggggggtccctgagactctcctgtgcagcctctggattcacttttagaagttatagcatgaactgggtccgccaggctccagggaaggggctggagtgggttttatacattagtagtagtagtagtatcaaaaagtacgcagactctgtgaagggccgattcaccatctccagagacaatgccaagaactcactgtatctgcaaatgaacagcctgagagacgaggacacggctgtgtattactgtgtgagagatgatgggagctactactttgactactggggccagggaaccctggtcaccgtctcctca

SEQ ID NO: 31712 - protein, 118 aa, synthetic construct
  REGION 1..118: note = Description of Artificial Sequence: Synthetic polypeptide
EVQLVESGGGLVQPGGSLRLSCAASGFTFRSYSMNWVRQAPGKGLEWVLYISSSSSIKKYADSVKGRFTISRDNAKNSLYLQMNSLRDEDTAVYYCVRDDGSYYFDYWGQGTLVTVSS

SEQ ID NO: 31713 - DNA, 354 bp, synthetic construct; identical to SEQ ID NO: 31709
  misc_feature 1..354: note = Description of Artificial Sequence: Synthetic polynucleotide
  source 1..354: mol_type = other DNA

SEQ ID NO: 31714 - protein, 118 aa, synthetic construct; identical to SEQ ID NO: 31710
  REGION 1..118: note = Description of Artificial Sequence: Synthetic polypeptide

SEQ ID NO: 31715 - DNA, 357 bp, synthetic construct
  misc_feature 1..357: note = Description of Artificial Sequence: Synthetic polynucleotide
  source 1..357: mol_type = other DNA
caggtgcagctgcaggagtcgggcccaggactggtgaagccgtcacagaccctgtccctcacctgcactgtctctggtggctccatcagcagtggtggttcctactggagctggatccgccagcacccagggaagggcctggagtggattgggtacatctattacattgggaccacctactacaacccgtccctcaagagtcgagttaccatatcagtagacacgtctacgaaccacttctccctgaaactgagctctgtgactgccgcggacacggccgtgtattactgtgcgagagatgagccattgaccggtatggacgtctggggccaagggaccacggtcaccgtctcctca

SEQ ID NO: 31716 - protein, 119 aa, synthetic construct
  REGION 1..119: note = Description of Artificial Sequence: Synthetic polypeptide
QVQLQESGPGLVKPSQTLSLTCTVSGGSISSGGSYWSWIRQHPGKGLEWIGYIYYIGTTYYNPSLKSRVTISVDTSTNHFSLKLSSVTAADTAVYYCARDEPLTGMDVWGQGTTVTVSS

SEQ ID NO: 31717 - DNA, 348 bp, synthetic construct
  misc_feature 1..348: note = Description of Artificial Sequence: Synthetic polynucleotide
  source 1..348: mol_type = other DNA
caggtgcagctggtgcagtctggggctgaggtgaagaagcctggggcctcagtgaagatctcctgcaaggcttctggattcaccttcaccgactactatatgaactgggtgcgacaggcccctggacaagggcttgagtggatgggatggatcaaccctaacagtggtggcacaaactatgcacagaagtttcagggcagggtcaccatgaccagggacacgtccatcagcacagcctacatggagctgagtaggctgagatctgacgacacggccgtgtattactgtgcgagagggtatgactcgttcgccccctggggccagggaaccctggtcaccgtctcctca

SEQ ID NO: 31718 - protein, 116 aa, synthetic construct
  REGION 1..116: note = Description of Artificial Sequence: Synthetic polypeptide
QVQLVQSGAEVKKPGASVKISCKASGFTFTDYYMNWVRQAPGQGLEWMGWINPNSGGTNYAQKFQGRVTMTRDTSISTAYMELSRLRSDDTAVYYCARGYDSFAPWGQGTLVTVSS

SEQ ID NO: 31719 - DNA, 357 bp, synthetic construct
  misc_feature 1..357: note = Description of Artificial Sequence: Synthetic polynucleotide
  source 1..357: mol_type = other DNA
caggtgcagttggtggagtctgggggaggcgtggtccagcctgggaggtccctgagactctcctgtgcagcgtctggattcaccttcagtcactatggcatgcactgggtccgccaggctccaggcaaggggctggagtgggtggcagttatatggtatgatggaagtaataaatactatgcagactccgtgaagggccgattcaccatctccagagacaattccaagaacacgctgtatctgcaaatgaacagcctgagagccgaggacacggctgtgtattactgtgcgaggggggactggaaccccgagggtttggacgtctggggccaagggaccacggtcaccgtctcctca

SEQ ID NO: 31720 - protein, 119 aa, synthetic construct
  REGION 1..119: note = Description of Artificial Sequence: Synthetic polypeptide
QVQLVESGGGVVQPGRSLRLSCAASGFTFSHYGMHWVRQAPGKGLEWVAVIWYDGSNKYYADSVKGRFTISRDNSKNTLYLQMNSLRAEDTAVYYCARGDWNPEGLDVWGQGTTVTVSS

SEQ ID NO: 31721 - DNA, 357 bp, synthetic construct
  misc_feature 1..357: note = Description of Artificial Sequence: Synthetic polynucleotide
  source 1..357: mol_type = other DNA
caggtgcacctggtggagtctgggggaggcgtggtccagcctgggaggtccctgagactctcctgtgcagcgtctggattcaccttcagtaactatggcatgcactgggtccgccaggctccaggcaaggggctggagtgggtggcagttatatggtatgatggaagtaataaatactatgcagactccgtgaagggccgattcaccatctccagagacaattccaagaacacgctgtatctgcaaatgaacagcctgagagccgaggacacggctgtgtattactgtgcgaggggggactggaaccccgagggtatggacgtctggggccaagggaccacggtcatcgtctcctca

SEQ ID NO: 31722 - protein, 119 aa, synthetic construct
  REGION 1..119: note = Description of Artificial Sequence: Synthetic polypeptide
QVHLVESGGGVVQPGRSLRLSCAASGFTFSNYGMHWVRQAPGKGLEWVAVIWYDGSNKYYADSVKGRFTISRDNSKNTLYLQMNSLRAEDTAVYYCARGDWNPEGMDVWGQGTTVIVSS

SEQ ID NO: 31723 - DNA, 357 bp, synthetic construct
  misc_feature 1..357: note = Description of Artificial Sequence: Synthetic polynucleotide
  source 1..357: mol_type = other DNA
caggtgcagctggtggagtctgggggaggcgtggtccagcctgggaggtccctgagactctcctgtgcagcgtctggattcaccttcagtcactatggcatgcactgggtccgccaggctccaggcaaggggctggagtgggtggcagttatatggtatgatggaagtaataaatactatgcagactccgtgaagggccgattcaccatctccagagacaattccaagaacacgctgtatctgcaaatgaacaccctgagagccgaggacacggctatctattactgtgcgaggggggactggaaccccgagggtttggacgtctggggccaagggaccacggtcaccgtctcctca

SEQ ID NO: 31724 - protein, 119 aa, synthetic construct
  REGION 1..119: note = Description of Artificial Sequence: Synthetic polypeptide
QVQLVESGGGVVQPGRSLRLSCAASGFTFSHYGMHWVRQAPGKGLEWVAVIWYDGSNKYYADSVKGRFTISRDNSKNTLYLQMNTLRAEDTAIYYCARGDWNPEGLDVWGQGTTVTVSS

SEQ ID NO: 31725 - DNA, 354 bp, synthetic construct
  misc_feature 1..354: note = Description of Artificial Sequence: Synthetic polynucleotide
  source 1..354: mol_type = other DNA
caggtgcagctggtggagtctgggggaggcgtggtccagcctgggaggtccctgagactctcctgtgcagcgtctggattcaccttcagtagctatgccatgcactgggtccgccaggctccaggcaaggggctggagtgggtggcagttatatggtatgatggaagtaataaatactatgcagactccgtgaagggccgattcaccatcgccagagacaattccaagaacacgctgtatctgcaaatgaacagcctgagagccgaggacacggctgtgtattactgtgcgagagatcctgggagctacgggttcgacccctggggccagggaaccctggtcaccgtctcctca

SEQ ID NO: 31726 - protein, 118 aa, synthetic construct
  REGION 1..118: note = Description of Artificial Sequence: Synthetic polypeptide
QVQLVESGGGVVQPGRSLRLSCAASGFTFSSYAMHWVRQAPGKGLEWVAVIWYDGSNKYYADSVKGRFTIARDNSKNTLYLQMNSLRAEDTAVYYCARDPGSYGFDPWGQGTLVTVSS

SEQ ID NO: 31727 - DNA, 360 bp, synthetic construct
  misc_feature 1..360: note = Description of Artificial Sequence: Synthetic polynucleotide
  source 1..360: mol_type = other DNA
caggtgcagctggtggagtctgggggaggcgtggtccagcctgggaggtccctgagactctcctgtgcagcgtctggattcaccttcaggaactatggcatgcactgggtccgccaggctccaggcaaggggctggagtgggtgtcaattatatggtttgatggaagtgatcaatactatgcagactccgtgaagggccgattcaccatctccagagacaactccaagaacacgctgtacctgcaaatgaacagcctgagagccgaggacacggctgtttattactgtgcgagaggcctctctgtctactactacggtatgggcgtctggggccaagggaccacggtcaccgtctcctca

SEQ ID NO: 31728 - protein, 120 aa, synthetic construct
  REGION 1..120: note = Description of Artificial Sequence: Synthetic polypeptide
QVQLVESGGGVVQPGRSLRLSCAASGFTFRNYGMHWVRQAPGKGLEWVSIIWFDGSDQYYADSVKGRFTISRDNSKNTLYLQMNSLRAEDTAVYYCARGLSVYYYGMGVWGQGTTVTVSS

SEQ ID NO: 31729 - DNA, 357 bp, synthetic construct
  misc_feature 1..357: note = Description of Artificial Sequence: Synthetic polynucleotide
  source 1..357: mol_type = other DNA
caggtgcagctggtggagtctgggggaggcgtggtccagcctgggaggtccctgagactctcctgtgcagcgtctggattcaccttcagtcactatggcatgcactgggtccgccaggctccaggcaaggggctggagtgggtggcagttatatggtatgatggaagtaataaatactatgcagactccgtgaagggccgattcaccatctccagagacaattccaagaacacgctgtatctacaaatgaacagcctgagagccgaggacacggctgtgtattactgtgcgaggggggactggaaccccgagggtttggacgtctggggccaagggaccacggtcaccgtctcctca

SEQ ID NO: 31730 - protein, 119 aa, synthetic construct; identical to SEQ ID NO: 31720
  REGION 1..119: note = Description of Artificial Sequence: Synthetic polypeptide

SEQ ID NO: 31731 - DNA, 357 bp, synthetic construct
  misc_feature 1..357: note = Description of Artificial Sequence: Synthetic polynucleotide
  source 1..357: mol_type = other DNA
caggtgcagctgcaggagtcgggcccaggactggtgaagccttcacagaccctgtccctcacctgcactgtctctggtggctccatcagcagtggtggttactactggagctggacccgccagcacccagggaagggcctggagtggattgggtacatctattacgttgggagcacctactacaacccgtccctcaagagtcgagttaccatatcagtagacacgtctaagaaccagttctccctgaagctgagttctgtgactgccgcggacacggccgtgtattactgtgcgagagatgggccattgagcggtatggacgtctggggccaagggaccacggtcaccgtctcctca

SEQ ID NO: 31732 - protein, 119 aa, synthetic construct
  REGION 1..119: note = Description of Artificial Sequence: Synthetic polypeptide
QVQLQESGPGLVKPSQTLSLTCTVSGGSISSGGYYWSWTRQHPGKGLEWIGYIYYVGSTYYNPSLKSRVTISVDTSKNQFSLKLSSVTAADTAVYYCARDGPLSGMDVWGQGTTVTVSS

SEQ ID NO: 31733 - DNA, 357 bp, synthetic construct
  misc_feature 1..357: note = Description of Artificial Sequence: Synthetic polynucleotide
  source 1..357: mol_type = other DNA
caggtgcagctgcaggagtcgggcccaggactggtgaagccttcacagaccctgtccctcacctgcactgtctctggtggctccatcagaagtggtggtgactactggagctggatccgccagcacccagggaagggcctggagtggattggatacatctattatagtgggagcacctactacaacccgtccctcaagagtcgagttaccatattactagacacgtctaagaaccagttctccctgaagctgagctctgtgactgtcgcggacacggccgtgtattactgtgcgagagattcagcagtgtacaatatggacgtctggggccaagggaccacggtcaccgtctcctca

SEQ ID NO: 31734 - protein, 119 aa, synthetic construct
  REGION 1..119: note = Description of Artificial Sequence: Synthetic polypeptide
QVQLQESGPGLVKPSQTLSLTCTVSGGSIRSGGDYWSWIRQHPGKGLEWIGYIYYSGSTYYNPSLKSRVTILLDTSKNQFSLKLSSVTVADTAVYYCARDSAVYNMDVWGQGTTVTVSS

SEQ ID NO: 31735 - DNA, 357 bp, synthetic construct
  misc_feature 1..357: note = Description of Artificial Sequence: Synthetic polynucleotide
  source 1..357: mol_type = other DNA
caggtgcagctgcaggagtcgggcccaggactggtgaagccttcacagaccctgtccctcacctgcactgtctctggtggctccatcagcagtggtggtgactactggagctggatccgccagcacccagggaagggcctggagtggattgggtacatctattacactgggagcaactactacaacccgtccctcaagagtcgagttaccatatcagtagacacgtctaagaatcagttctccctgaacctgatctctgtgactgccgcggacacggccgtgtattactgtgcgagagattcagcagtgtacggtatggacgtctggggccaagggaccacggtcaccgtctcctca

SEQ ID NO: 31736 - protein, 119 aa, synthetic construct
  REGION 1..119: note = Description of Artificial Sequence: Synthetic polypeptide
QVQLQESGPGLVKPSQTLSLTCTVSGGSISSGGDYWSWIRQHPGKGLEWIGYIYYTGSNYYNPSLKSRVTISVDTSKNQFSLNLISVTAADTAVYYCARDSAVYGMDVWGQGTTVTVSS

SEQ ID NO: 31737 - DNA, 357 bp, synthetic construct
  misc_feature 1..357: note = Description of Artificial Sequence: Synthetic polynucleotide
  source 1..357: mol_type = other DNA
caggtgcaactggtggagtctgggggaggcgtggtccagcctgggaggtccctgagactctcctgtgcagcgtctggattcaccttcagtcactatggcatgcactgggtccgccaggctccaggcaaggggctggagtgggtggcagttatatggtatgatggaagtaataaatactatgcagactccgtgaagggccgattcaccatctccagagacaattccaagaacacgctgtatctgcaaatgaacagcctgagagccgaggacacggctgtgtattactgtgcgaggggggactggaaccccgagggtatggacgtctggggccaagggacctcggtcaccgtctcctca

SEQ ID NO: 31738 - protein, 119 aa, synthetic construct
  REGION 1..119: note = Description of Artificial Sequence: Synthetic polypeptide
QVQLVESGGGVVQPGRSLRLSCAASGFTFSHYGMHWVRQAPGKGLEWVAVIWYDGSNKYYADSVKGRFTISRDNSKNTLYLQMNSLRAEDTAVYYCARGDWNPEGMDVWGQGTSVTVSS

SEQ ID NO: 31739 - DNA, 357 bp, synthetic construct
  misc_feature 1..357: note = Description of Artificial Sequence: Synthetic polynucleotide
  source 1..357: mol_type = other DNA
caggtgcacctggtggagtctgggggaggcgtggtccaggctgggaggtccctgagactctcctgtgcagcgtctggattcaccttcagtaactatggcatgcactgggtccgccaggctccaggcaaggggctggagtgggtggcagttatatggtatgatggaagtaataaatactatgcagactccgtgaagggccgattcaccatctccagagacaattccaagaacacgctgtatctgcaaatgaacagcctgagagccgaggacacggctgtgtattactgtgcgaggggggactggaaccccgagggtatggacgtctggggccaagggaccacggtcatcgtctcctca

SEQ ID NO: 31740 - protein, 119 aa, synthetic construct
  REGION 1..119: note = Description of Artificial Sequence: Synthetic polypeptide
QVHLVESGGGVVQAGRSLRLSCAASGFTFSNYGMHWVRQAPGKGLEWVAVIWYDGSNKYYADSVKGRFTISRDNSKNTLYLQMNSLRAEDTAVYYCARGDWNPEGMDVWGQGTTVIVSS

SEQ ID NO: 31741 - DNA, 357 bp, synthetic construct
  misc_feature 1..357: note = Description of Artificial Sequence: Synthetic polynucleotide
  source 1..357: mol_type = other DNA
caggtgcagctggtggagtctgggggaggcgtggtccagcctgggaggtccctgagactctcctgtgcagcgtctggattcaccttcagtcactatggcatgcactgggtccgccaggctccaggcaaggggctggagtgggtggcagttatatggtatgatggaagtaataaatactatgcggactccgtgaagggccgattcaccatctccagagacaattccaagaacacgctgtatctgcaaatgaacagcctgagagccgaggacacggctgtgtattactgtgcgaggggggactggaaccccgagggtttggacgtctggggccaagggaccacggtcaccgtctcctca

SEQ ID NO: 31742 - protein, 119 aa, synthetic construct; identical to SEQ ID NO: 31720
  REGION 1..119: note = Description of Artificial Sequence: Synthetic polypeptide

SEQ ID NO: 31743 - DNA, 357 bp, synthetic construct
  misc_feature 1..357: note = Description of Artificial Sequence: Synthetic polynucleotide
  source 1..357: mol_type = other DNA
caggtgcagttggtggagtctgggggaggcgtggtccagcctgggaggtccctgagactctcctgtgcagcgtctggattcaccttcagtcactatggcatgcactgggtccgccaggctccaggcaaggggctggagtgggtggcagttatatggtatgatggaagtaataaatactgtgcagactccgtgaagggccgattcaccatctccagagacaattccacgaacacgctgtatctgcaaatgaacagcctgagagccgaggacacggctgtgtattactgtgcgaggggagactggaaccccgagggtttggacgtctggggccaagggaccacggtcaccgtctcctca

SEQ ID NO: 31744 - protein, 119 aa, synthetic construct
  REGION 1..119: note = Description of Artificial Sequence: Synthetic polypeptide
QVQLVESGGGVVQPGRSLRLSCAASGFTFSHYGMHWVRQAPGKGLEWVAVIWYDGSNKYCADSVKGRFTISRDNSTNTLYLQMNSLRAEDTAVYYCARGDWNPEGLDVWGQGTTVTVSS

SEQ ID NO: 31745 - DNA, 357 bp, synthetic construct
  misc_feature 1..357: note = Description of Artificial Sequence: Synthetic polynucleotide
  source 1..357: mol_type = other DNA
caggtgcagctgcaggagtcgggcccaggactggtgaagccttcacagaccctgtccctcacctgcagtgtctctggtggctccatcagaagtggtggtgactactggagctggatccgccagcacccagggaagggcctggagtggattgggtatatgtattacagtgggagcacctactacaacccgtccctcaagagtcgagttaccatatcagtagacacgtctaagaaccagttctccctgaagctgagttctgtgactgtcgcggacacggccgtgtattactgtgcgcgagattcagcagtgtacggtatggacgtctggggccaagggaccacggtcaccgtctcctca

SEQ ID NO: 31746 - protein, 119 aa, synthetic construct
  REGION 1..119: note = Description of Artificial Sequence: Synthetic polypeptide
QVQLQESGPGLVKPSQTLSLTCSVSGGSIRSGGDYWSWIRQHPGKGLEWIGYMYYSGSTYYNPSLKSRVTISVDTSKNQFSLKLSSVTVADTAVYYCARDSAVYGMDVWGQGTTVTVSS

SEQ ID NO: 31747 - DNA, 357 bp, synthetic construct
  misc_feature 1..357: note = Description of Artificial Sequence: Synthetic polynucleotide
  source 1..357: mol_type = other DNA
caggtgcagctgcaggagtcgggcccaggactggtgaagccttcacagaccctgtccctcacctgcactgtctctggtggctccatcagaagtggtggtgactactggagttggatccgccagcacccagggaagggcctggagtggattgggtacatctattacagtgggagcacctactacaacccgtccctcaagagtcgagttaccatatcaggagacacgtctaagaaccagttctccctgaagctgagctctgtgactgccgcggacacggccgtgtattactgtgcgagggatagcagctcctacggtatggacgtctggggccaagggaccacggtcaccgtctcctca

SEQ ID NO: 31748 - protein, 119 aa, synthetic construct
  REGION 1..119: note = Description of Artificial Sequence: Synthetic polypeptide
QVQLQESGPGLVKPSQTLSLTCTVSGGSIRSGGDYWSWIRQHPGKGLEWIGYIYYSGSTYYNPSLKSRVTISGDTSKNQFSLKLSSVTAADTAVYYCARDSSSYGMDVWGQGTTVTVSS

SEQ ID NO: 31749 - DNA, 357 bp, synthetic construct
  misc_feature 1..357: note = Description of Artificial Sequence: Synthetic polynucleotide
  source 1..357: mol_type = other DNA
caggtgcagctggtggagtctgggggaggcgtggtccagcctgggaggtccctgagactctcctgtgcagcgtctggattcaccttcagtcactatggcatgcactgggtccgccaggctccaggcaaggggctggagtgggtggcagttatatggtatgatggaagtaataaatactatgcagactccgtgaagggccgattcaccatctccagagacaattccaagaacacgctgcatctgcaaatgaacagcctgagagccgaggacacggctgtgtattactgtgcgaggggggactggaaccccgagggtatggacgtctggggccaagggacctcggtcaccgtctcctca

SEQ ID NO: 31750 - protein, 119 aa, synthetic construct
  REGION 1..119: note = Description of Artificial Sequence: Synthetic polypeptide
QVQLVESGGGVVQPGRSLRLSCAASGFTFSHYGMHWVRQAPGKGLEWVAVIWYDGSNKYYADSVKGRFTISRDNSKNTLHLQMNSLRAEDTAVYYCARGDWNPEGMDVWGQGTSVTVSS

SEQ ID NO: 31751 - DNA, 357 bp, synthetic construct
  misc_feature 1..357: note = Description of Artificial Sequence: Synthetic polynucleotide
  source 1..357: mol_type = other DNA
caggtgcagctggtggaatctgggggaggcgtggtccagcctgggaggtccctgagactctcctgtgcagcgtctggattcaccttcagtcactatggcatgcactgggtccgccaggctccaggcaaggggctggagtgggtggcagttatatggtatgatggaagtaataaatactatgcagactccgtgaagggccgattcaccatctccagagacaattccaagaacacgctgtttctgcaaatgaacagcctgagagtcgaggacacggctgtgtattattgtgcgaggggggactggaaccccgagggtatggacgtctggggccaagggaccacggtcaccgtctcctca

SEQ ID NO: 31752 - protein, 119 aa, synthetic construct
  REGION 1..119: note = Description of Artificial Sequence: Synthetic polypeptide
QVQLVESGGGVVQPGRSLRLSCAASGFTFSHYGMHWVRQAPGKGLEWVAVIWYDGSNKYYADSVKGRFTISRDNSKNTLFLQMNSLRVEDTAVYYCARGDWNPEGMDVWGQGTTVTVSS

SEQ ID NO: 31753 - DNA, 357 bp, synthetic construct
  misc_feature 1..357: note = Description of Artificial Sequence: Synthetic polynucleotide
  source 1..357: mol_type = other DNA
caggtgcagctgcaggagtcgggcccaggactggtgaagccttcacagaccctgtccctcacctgcactgtctctggtggctccatcagaagtggtggtgactactggagctggatccgccagcacccagggaagggcctggagtggattgggtacatctattatagtgggagcacctactacaacccgtccctcaagagtcgagttaccatatcactagacacgtctaagaaccagttctccctgaagctgagctctgtgactgtcgcggacacggccgtgtattactgtgcgagagattcagcagtgtacaatatggacgtctggggccaagggaccacggtcaccgtctcctca

SEQ ID NO: 31754 - protein, 119 aa, synthetic construct
  REGION 1..119: note = Description of Artificial Sequence: Synthetic polypeptide
QVQLQESGPGLVKPSQTLSLTCTVSGGSIRSGGDYWSWIRQHPGKGLEWIGYIYYSGSTYYNPSLKSRVTISLDTSKNQFSLKLSSVTVADTAVYYCARDSAVYNMDVWGQGTTVTVSS

SEQ ID NO: 31755 - DNA, 348 bp, synthetic construct
  misc_feature 1..348: note = Description of Artificial Sequence: Synthetic polynucleotide
  source 1..348: mol_type = other DNA
caggtgcagctggtgcagtctggggctgaggtgaagaagcctggggcctccgtgaagatctcctgcagggcttctggattcaccttcaccgactactatatgaactgggtgcgacaggcccctggacaagggcttgagtggatgggatggatcaaccctaagaatggtggcacaaactatgcacagaagtttcagggcagggtcaccatgaccagggacacgtccctcagcagagcctacatggagctgagtaggctgagatctgacgacacggccgtgtattactgtgcgaaagggtatgattcgttcgccccctggggccagggaaccctggtcaccgtctcctca

SEQ ID NO: 31756 - protein, 116 aa, synthetic construct
  REGION 1..116: note = Description of Artificial Sequence: Synthetic polypeptide
QVQLVQSGAEVKKPGASVKISCRASGFTFTDYYMNWVRQAPGQGLEWMGWINPKNGGTNYAQKFQGRVTMTRDTSLSRAYMELSRLRSDDTAVYYCAKGYDSFAPWGQGTLVTVSS

SEQ ID NO: 31757 - DNA, 357 bp, synthetic construct; identical to SEQ ID NO: 31747
  misc_feature 1..357: note = Description of Artificial Sequence: Synthetic polynucleotide
  source 1..357: mol_type = other DNA

SEQ ID NO: 31758 - protein, 119 aa, synthetic construct; identical to SEQ ID NO: 31748
  REGION 1..119: note = Description of Artificial Sequence: Synthetic polypeptide

SEQ ID NO: 31759 - DNA, 363 bp, synthetic construct
  misc_feature 1..363: note = Description of Artificial Sequence: Synthetic polynucleotide
  source 1..363: mol_type = other DNA
caggtgcagctgcaggagtcgggcccaggactggtgaagccttcacagaccctgtccctcacctgcactgtctctggtggctccatcagtactgctttttactactggagctggatccgccagcacccagggaagggcctggagtggattgggtacatctatttcagtgggagcacctactacaacccgtccctcaagagtcgagttaccatatcagtagacacgtctaagaaccagttctccctgaacctgagctctgtgactgccgcggacacggccgtgtattactgtgcgagagcaaggggatatcactacagtatctttgactactggggccagggaaccctggtcaccgtctcctca

SEQ ID NO: 31760 - protein, 121 aa, synthetic construct
  REGION 1..121: note = Description of Artificial Sequence: Synthetic polypeptide
QVQLQESGPGLVKPSQTLSLTCTVSGGSISTAFYYWSWIRQHPGKGLEWIGYIYFSGSTYYNPSLKSRVTISVDTSKNQFSLNLSSVTAADTAVYYCARARGYHYSIFDYWGQGTLVTVSS

SEQ ID NO: 31761 - DNA, 357 bp, synthetic construct
  misc_feature 1..357: note = Description of Artificial Sequence: Synthetic polynucleotide
  source 1..357: mol_type = other DNA
caggtgcagctgcaggagtcgggcccaggactggtgaagccttcacagaccctgtccctcacctgcactgtctctggtggctccatcagcagtggtggtgattactggagctggatccgccagcacccagggaagggcctggagtggattgggtacatctattacagtgggcccacctactacaacccgtccctcaagagtcgagttaccatatcagtagacacgtctaagaaccagttctccctgaagctgagctctgtgactgccgcggacacggccgtgtattattgtgcgagagatggggctgcggagggtatggacgtctggggccaagggaccacggtcaccgtctcctca

SEQ ID NO: 31762 - protein, 119 aa, synthetic construct
  REGION 1..119: note = Description of Artificial Sequence: Synthetic polypeptide
QVQLQESGPGLVKPSQTLSLTCTVSGGSISSGGDYWSWIRQHPGKGLEWIGYIYYSGPTYYNPSLKSRVTISVDTSKNQFSLKLSSVTAADTAVYYCARDGAAEGMDVWGQGTTVTVSS

SEQ ID NO: 31763 - DNA, 357 bp, synthetic construct
  misc_feature 1..357: note = Description of Artificial Sequence: Synthetic polynucleotide
  source 1..357: mol_type = other DNA
caggtgcagttgcaggagtcgggcccaggactggtgaagccttcacagaccctgtccctcacctgcactgtctctggtggctccatcagcagtggtggtgactactggagctggatccgccagcacccagggaagggcctggagtggattgggtacatctattacactgggagcaactactacaacccgtccctcaagagtcgagttaccatatcagtagacacgtctaagaatcagttctccctgaaggtgatctctgtgactgccgcggacacggccgtgtattactgtgcgagagattcagcagtgtacggtatggacgtctggggccaagggaccacggtcaccgtctcctca

SEQ ID NO: 31764 - protein, 119 aa, synthetic construct
  REGION 1..119: note = Description of Artificial Sequence: Synthetic polypeptide
QVQLQESGPGLVKPSQTLSLTCTVSGGSISSGGDYWSWIRQHPGKGLEWIGYIYYTGSNYYNPSLKSRVTISVDTSKNQFSLKVISVTAADTAVYYCARDSAVYGMDVWGQGTTVTVSS

SEQ ID NO: 31765 - DNA, 357 bp, synthetic construct
  misc_feature 1..357: note = Description of Artificial Sequence: Synthetic polynucleotide
  source 1..357: mol_type = other DNA
gaggtgcagctggtggagtctgggggaggcttggtaaagcctggggggtcccttagactctcctgtgcagcctctggattcactttcagtaacgcctggatgcactgggtccgccaggctccagggaaggggctggagtgggttggccgtattaaaagcaaaactaatggtgggacaacagactacgctgcacccgtgaaaggcagattcaccatttcaagagatgattcaaaaaacacgctgtatctgcaaatgaacagcctgaaaaccgaggacacagccgtgtattactgtaccacagatccgggggggatctttgactactggggccagggaaccctggtcaccgtctcctca

SEQ ID NO: 31766 - protein, 119 aa, synthetic construct
  REGION 1..119: note = Description of Artificial Sequence: Synthetic polypeptide
EVQLVESGGGLVKPGGSLRLSCAASGFTFSNAWMHWVRQAPGKGLEWVGRIKSKTNGGTTDYAAPVKGRFTISRDDSKNTLYLQMNSLKTEDTAVYYCTTDPGGIFDYWGQGTLVTVSS

SEQ ID NO: 31767 - DNA, 357 bp, synthetic construct
  misc_feature 1..357: note = Description of Artificial Sequence: Synthetic polynucleotide
  source 1..357: mol_type = other DNA
cagacgcagctggtggagtctgggggaggcgtggtccagcctgggaggtccctgagactctcctgtgcagcgtctggattcaccttcagtcactatggcatgcactgggtccgccaggctccaggcaaggggctggaatgggtggcagttatatggtatgatggaagtaatgagtactatgcagactccgtgaagggccgattcaccatctccagagacaattccaagaacacgctgtatctgcaaatgaacagcctgagagccgaggacacggctgtgtattactgtgcgaggggggactggaaccccgagggtatggacgtctggggccaagggaccacggtcaccgtctcctca

SEQ ID NO: 31768 - protein, 119 aa, synthetic construct
  REGION 1..119: note = Description of Artificial Sequence: Synthetic polypeptide
QTQLVESGGGVVQPGRSLRLSCAASGFTFSHYGMHWVRQAPGKGLEWVAVIWYDGSNEYYADSVKGRFTISRDNSKNTLYLQMNSLRAEDTAVYYCARGDWNPEGMDVWGQGTTVTVSS

SEQ ID NO: 31769 - DNA, 357 bp, synthetic construct; identical to SEQ ID NO: 31745
  misc_feature 1..357: note = Description of Artificial Sequence: Synthetic polynucleotide
  source 1..357: mol_type = other DNA

SEQ ID NO: 31770 - protein, 119 aa, synthetic construct; identical to SEQ ID NO: 31746
  REGION 1..119: note = Description of Artificial Sequence: Synthetic polypeptide

SEQ ID NO: 31771 - DNA, 357 bp, synthetic construct
  misc_feature 1..357: note = Description of Artificial Sequence: Synthetic polynucleotide
  source 1..357: mol_type = other DNA
caggtgcagctggtggagtctgggggaggcgtggtccagcctgggaggtccctgagactctcctgtgcagcgtctggattcaccttcagtcactatggcatgcactgggtccgccaggctccaggcaaggggctggagtgggtggcagttatatggtatgatggaagtaataaatactatgcagactccgtgaagggccgattcaccatctccagagacaattccaagaacacgctgtatctgcaaatgaacagcctgagagccgaggacacggctgtgtattactgtgcgaggggggactggaaccccgagggtttggacgtctggggccaagggaccacggtcaccgtctcctca

SEQ ID NO: 31772 - protein, 119 aa, synthetic construct; identical to SEQ ID NO: 31720
  REGION 1..119: note = Description of Artificial Sequence: Synthetic polypeptide

SEQ ID NO: 31773 - DNA, 357 bp, synthetic construct; identical to SEQ ID NO: 31745
  misc_feature 1..357: note = Description of Artificial Sequence: Synthetic polynucleotide
  source 1..357: mol_type = other DNA

SEQ ID NO: 31774 - protein, 119 aa, synthetic construct; identical to SEQ ID NO: 31746
  REGION 1..119: note = Description of Artificial Sequence: Synthetic polypeptide

SEQ ID NO: 31775 - DNA, 357 bp, synthetic construct
  misc_feature 1..357: note = Description of Artificial Sequence: Synthetic polynucleotide
  source 1..357: mol_type = other DNA
caggtgcagctgcaggagtcgggcccaggactggtgaagccttcacagaccctgtccctcacctgcactgtctctggtggctccatcagcagtggtggtgattactggagctggatccgccagcacccagggaagggcctggagtggattgggtacatctattacagtgggcccacctactacaacccgtccctcaagagtcgagttaccatatcagtagacacgtctaagaaccagttctccctgaagctgagctctgtgactgccgcggacacggccgtgtattattgtgcgagagatggggctgcggagggtttggacgtctggggccaagggaccacggtcaccgtctcctca

SEQ ID NO: 31776 - protein, 119 aa, synthetic construct
  REGION 1..119: note = Description of Artificial Sequence: Synthetic polypeptide
QVQLQESGPGLVKPSQTLSLTCTVSGGSISSGGDYWSWIRQHPGKGLEWIGYIYYSGPTYYNPSLKSRVTISVDTSKNQFSLKLSSVTAADTAVYYCARDGAAEGLDVWGQGTTVTVSS

SEQ ID NO: 31777 - DNA, 357 bp, synthetic construct
  misc_feature 1..357: note = Description of Artificial Sequence: Synthetic polynucleotide
  source 1..357: mol_type = other DNA
caggtgcagctggtggagtctgggggaggcgtggtccagcctgggaggtccctgagactctcctgtgcagcgtctggattcaccttcagtagctatgccatgcactgggtccgccaggctccaggcaaggggctggagtgggtggcagttatatggtatgatggaagtaataaatactatgcagactccgtgaagggccgattcaccatctccagagacaattccaagaacacgctgtatctgcaaatgaacagcctgagagccgaggacacggctgtgtattactgtgcgagagatctgggactgggatacttctttgactactggggccagggaaccctagtcaccgtctcctca

SEQ ID NO: 31778 - protein, 119 aa, synthetic construct
  REGION 1..119: note = Description of Artificial Sequence: Synthetic polypeptide
QVQLVESGGGVVQPGRSLRLSCAASGFTFSSYAMHWVRQAPGKGLEWVAVIWYDGSNKYYADSVKGRFTISRDNSKNTLYLQMNSLRAEDTAVYYCARDLGLGYFFDYWGQGTLVTVSS

SEQ ID NO: 31779 - DNA, 357 bp, synthetic construct
  misc_feature 1..357: note = Description of Artificial Sequence: Synthetic polynucleotide
  source 1..357: mol_type = other DNA
caggtgcacctggtggagtctgggggaggcgtggtccagcctgggaggtccctgagactctcctgtgcagcgtctggattcaccttcagtaactatggcatgcactgggtccgccaggctccaggcaaggggctggagtgggtggcagttatatggtatgatggaagtaataaatactatgcagactccgtgaagggccgattcaccatctccagagacaattccaagaacacgctgtatctgcaaatgaacagcctgagagccgaggacacggctgtgtattattgtgcgaggggggactggaaccccgagggtatggacgtctggggccaagggaccacggtcatcgtctcctca

SEQ ID NO: 31780 - protein, 119 aa, synthetic construct; identical to SEQ ID NO: 31722
  REGION 1..119: note = Description of Artificial Sequence: Synthetic polypeptide

SEQ ID NO: 31781 - DNA, 360 bp, synthetic construct
  misc_feature 1..360: note = Description of Artificial Sequence: Synthetic polynucleotide
  source 1..360: mol_type = other DNA
caggtgcagctggtggagtctgggggaggcgtggtccagcctgggaggtccctgagactctcctgtgcagcgtctggattcaccttcagtaactatggcatgcactgggtccgccaggctccaggcaaggggctggagtggatggcaattatatggtttgatggaagtgatgaatactatgcagactccgtgaagggccgattcaccatctccagagacaattccaagaacacgatgtatctgcaaatgaacagcctgagagccgaagacacggctgtgtattactgtgcgagaggcctatctgtctactactacggtatggacgtctggggccaagggaccacggtcaccgtctcctca

SEQ ID NO: 31782 - protein, 120 aa, synthetic construct
  REGION 1..120: note = Description of Artificial Sequence: Synthetic polypeptide
QVQLVESGGGVVQPGRSLRLSCAASGFTFSNYGMHWVRQAPGKGLEWMAIIWFDGSDEYYADSVKGRFTISRDNSKNTMYLQMNSLRAEDTAVYYCARGLSVYYYGMDVWGQGTTVTVSS

SEQ ID NO: 31783 - DNA, 360 bp, synthetic construct
  misc_feature 1..360: note = Description of Artificial Sequence: Synthetic polynucleotide
  source 1..360: mol_type = other DNA
caggtgcagttggtggagtctgggggaggcgtggtccagcctgggaggtccctgagactctcctgtgcagcgtctggattcaccttcaggaactatggcatgcactgggtccgccaggctccaggcaaggggctggagtgggtgtcaattatatggtttgatggaagtgatcagtactatgcagactccgtgaagggccgattcaccatctccagagacaattccaagaacacgctgtatctgcaaatgaacagcctgagagccgaggacacggctgtatattactgtgcgagaggcctctctgtctactactacggtatggacgtctggggccaagggaccacggtcaccgtctcctca

SEQ ID NO: 31784 - protein, 120 aa, synthetic construct
  REGION 1..120: note = Description of Artificial Sequence: Synthetic polypeptide
QVQLVESGGGVVQPGRSLRLSCAASGFTFRNYGMHWVRQAPGKGLEWVSIIWFDGSDQYYADSVKGRFTISRDNSKNTLYLQMNSLRAEDTAVYYCARGLSVYYYGMDVWGQGTTVTVSS

SEQ ID NO: 31785 - DNA, 357 bp, synthetic construct
  misc_feature 1..357: note = Description of Artificial Sequence: Synthetic polynucleotide
  source 1..357: mol_type = other DNA
caggtgcagctggtggagtctgggggaggcgtagtccagcctgggaggtccctgagactctcctgtgcagcgtctggattcaccttcagtagctatggcttgcactgggtccgccaggctccaggcaaggggctggagtgggtggcagttatatggtatgatggaagtaataaatactatgcagactccgtgaagggccgattcaccatctccagagacaattccaagaacacgctgtatctgcaaatgaacagcctgagagtcgaggacacggctgtgtactactgtgcgaactggtactactattactacggtatggacgtctggggccaagggaccacggtcaccgtctcctca

SEQ ID NO: 31786 - protein, 119 aa, synthetic construct
  REGION 1..119: note = Description of Artificial Sequence: Synthetic polypeptide
QVQLVESGGGVVQPGRSLRLSCAASGFTFSSYGLHWVRQAPGKGLEWVAVIWYDGSNKYYADSVKGRFTISRDNSKNTLYLQMNSLRVEDTAVYYCANWYYYYYGMDVWGQGTTVTVSS

SEQ ID NO: 31787 - DNA, 360 bp, synthetic construct
  misc_feature 1..360: note = Description of Artificial Sequence: Synthetic polynucleotide
  source 1..360: mol_type = other DNA
caggtgcagttggtggagtctgggggaggcgtggtccagcctgggaggtccctgagactctcctgtgcagcgtctggattcaccttcagtaactatggcatgcactgggtccgccaggctccaggcaaggggctggagtggatggcaattatatggtttgatggaagtgatgaatactatgcagactccgtgaagggccgattcaccatctccagagacaattccaagaacacgctgtatctgcaaatgaacagcctgagagccgaggacacggctgtatattactgtgcgagaggcctatctgtctactactacggtatggacgtctggggccaagggaccacggtcaccgtctcctca

SEQ ID NO: 31788 - protein, 120 aa, synthetic construct
  REGION 1..120: note = Description of Artificial Sequence: Synthetic polypeptide
QVQLVESGGGVVQPGRSLRLSCAASGFTFSNYGMHWVRQAPGKGLEWMAIIWFDGSDEYYADSVKGRFTISRDNSKNTLYLQMNSLRAEDTAVYYCARGLSVYYYGMDVWGQGTTVTVSS

SEQ ID NO: 31789 - DNA, 357 bp, synthetic construct
  misc_feature 1..357: note = Description of Artificial Sequence: Synthetic polynucleotide
  source 1..357: mol_type = other DNA
caggtgcagctggtggagtctgggggaggcgtggtccagcctgggaggtccctgagactctcctgtccagcgtctggattcaccttcagtcactatggcatgcactgggtccgccaggctccaggcaaggggctggagtgggtggcagtcatatggtatgatggaagtaataaatactatgcagactccgtgaagggccgattcaccatctccagagacaattccaagaatatgctgtatctgcaaatgaacagcctgagagccgaggacacggctgtgtattactgtgcgaggggggactggaaccccgagggtatggacgtctggggccaagggaccacggtcaccgtctcctca

SEQ ID NO: 31790 - protein, 119 aa, synthetic construct
  REGION 1..119: note = Description of Artificial Sequence: Synthetic polypeptide
QVQLVESGGGVVQPGRSLRLSCPASGFTFSHYGMHWVRQAPGKGLEWVAVIWYDGSNKYYADSVKGRFTISRDNSKNMLYLQMNSLRAEDTAVYYCARGDWNPEGMDVWGQGTTVTVSS

SEQ ID NO: 31791 - DNA, 357 bp, synthetic construct
  misc_feature 1..357: note = Description of Artificial Sequence: Synthetic polynucleotide
  source 1..357: mol_type = other DNA
caggtgcagctggtggagtctgggggaggcgtggtccagcctgggaggtccctgagactctcctgtgcagcgtctggattcaccttcagtcactatggcatgcactgggtccgccaggctccaggcaaggggctggagtgggtggcagttatatggtatgatggaagtaataaatactatgcagactccgtgaagggccgattcaccatctccagagacaattccaagaacacgctgcatctgcaaatgaacagcctgagagccgaggacacggctgtgtattactgtgcgaggggggactggaaccccgagggtatggacgtctggggccaagggaccacggtcaccgtctcctca

SEQ ID NO: 31792 - protein, 119 aa, synthetic construct
  REGION 1..119: note = Description of Artificial Sequence: Synthetic polypeptide
QVQLVESGGGVVQPGRSLRLSCAASGFTFSHYGMHWVRQAPGKGLEWVAVIWYDGSNKYYADSVKGRFTISRDNSKNTLHLQMNSLRAEDTAVYYCARGDWNPEGMDVWGQGTTVTVSS

SEQ ID NO: 31793 - DNA, 357 bp, synthetic construct; identical to SEQ ID NO: 31749
  misc_feature 1..357: note = Description of Artificial Sequence: Synthetic polynucleotide
  source 1..357: mol_type = other DNA

SEQ ID NO: 31794 - protein, 119 aa, synthetic construct; identical to SEQ ID NO: 31750
  REGION 1..119: note = Description of Artificial Sequence: Synthetic polypeptide

SEQ ID NO: 31795 - DNA, 393 bp, synthetic construct
  misc_feature 1..393: note = Description of Artificial Sequence: Synthetic polynucleotide
  source 1..393: mol_type = other DNA
caggtacagctgcagcagtcaggtccaggactggtgaagccctcgcagaccctctcactcacctgtgacatctccggggacagtgtctctagcaacagtgctgcttggaactggatcaggcagtccccatcgcgaggccttgagtggctgggaaggacatactacaggtccaagtggtataatgattatgcagtatctgtgaaaagtcgagtaaccatcaacccagacacatccaagaaccagttctccctgcagctgaactctgtgactcccgaggacacggctgtgtattactgtgcaagagaggggggcctaggatattgtagtagtaccagctgctatggaggctggttcgacccctggggccagggaaccctggtcaccgtctcctca

SEQ ID NO: 31796 - protein, 131 aa, synthetic construct
  REGION 1..131: note = Description of Artificial Sequence: Synthetic polypeptide
QVQLQQSGPGLVKPSQTLSLTCDISGDSVSSNSAAWNWIRQSPSRGLEWLGRTYYRSKWYNDYAVSVKSRVTINPDTSKNQFSLQLNSVTPEDTAVYYCAREGGLGYCSSTSCYGGWFDPWGQGTLVTVSS

SEQ ID NO: 31797 - DNA, 366 bp, synthetic construct
  misc_feature 1..366: note = Description of Artificial Sequence: Synthetic polynucleotide
  source 1..366: mol_type = other DNA
caggtacacctggtgcagtctggggctgaggtgaagaagcctggggcctcagtgaaggtctcctgcaaggcttctggatacaccttcaccggctactatatacactgggtgcgacaggcccctggacaagggcttgagtggatgggatggatcaaccctaaaaatggtggcacaaactatgcacagaagtttcagggcagggtcaccatgaccagggacgcgtccatcagcacaacctacatggagctgagcaggctgagatctgacgacacggccgtgtattactgtgcgagaggagcgtttgattacttctactactacgctatggacgtctggggccacgggaccacggtcaccgtctcctca

SEQ ID NO: 31798 - protein, 122 aa, synthetic construct
  REGION 1..122: note = Description of Artificial Sequence: Synthetic polypeptide
QVHLVQSGAEVKKPGASVKVSCKASGYTFTGYYIHWVRQAPGQGLEWMGWINPKNGGTNYAQKFQGRVTMTRDASISTTYMELSRLRSDDTAVYYCARGAFDYFYYYAMDVWGHGTTVTVSS

SEQ ID NO: 31799 - DNA, 390 bp, synthetic construct
  misc_feature 1..390: note = Description of Artificial Sequence: Synthetic polynucleotide
  source 1..390: mol_type = other DNA
caggtgcagctggtggagtctgggggaggcgtggtccagcctggggggtccctgagactctcctgtgcagcgtctggattcaccttcagtacctatggcatgcactgggtccgcctggctccaggcaaggggctggagtgggtggcagttatatggtatgatggaagtaataaatactatgcagactccgtgaagggccgattcaccatctccagagacatttcccagaacacgctgtatctgcaaatgaacagcctgagagccgaggacacggctgtgtattactgtgcgagagataaccactattgtagtagtaccagctgctccccatactactactacttcggtatggacgtctggggccaagggaccacggtcaccgtctcctca

SEQ ID NO: 31800 - protein, 130 aa, synthetic construct
  REGION 1..130: note = Description of Artificial Sequence: Synthetic polypeptide
QVQLVESGGGVVQPGGSLRLSCAASGFTFSTYGMHWVRLAPGKGLEWVAVIWYDGSNKYYADSVKGRFTISRDISQNTLYLQMNSLRAEDTAVYYCARDNHYCSSTSCSPYYYYFGMDVWGQGTTVTVSS

SEQ ID NO: 31801 - DNA, 387 bp, synthetic construct
  misc_feature 1..387: note = Description of Artificial Sequence: Synthetic polynucleotide
  source 1..387: mol_type = other DNA
caggtgcagttggtggagtctgggggaggcgtggtccagcctgggaggtccctgagactctcctgtgaagcgtctggattcatcttcagtagctatggcatgcactgggtccgccaggctccaggcaaggggctggagtgggtggcagttatgtggtatgatggaggtaataaagactatgcagactccgtgaagggccgattcaccatctccagagacaattccaagaacacgctgtatctgcaaatgaacagcctgagagccgaggacacggctgtgtattactgtgcgagagatcgggaatattgtactagtaccagctgcccttactactactactacggtatggacgtctggggccaagggaccacggtcaccgtctcctca

SEQ ID NO: 31802 - protein, 129 aa, synthetic construct
  REGION 1..129: note = Description of Artificial Sequence: Synthetic polypeptide
QVQLVESGGGVVQPGRSLRLSCEASGFIFSSYGMHWVRQAPGKGLEWVAVMWYDGGNKDYADSVKGRFTISRDNSKNTLYLQMNSLRAEDTAVYYCARDREYCTSTSCPYYYYYGMDVWGQGTTVTVSS

SEQ ID NO: 31803 - DNA, 372 bp, synthetic construct
  misc_feature 1..372: note = Description of Artificial Sequence: Synthetic polynucleotide
  source 1..372: mol_type = other DNA
caggtgcagctggtgcagtctggggctgaggtgaagaagcctggggcctcagtgaaggtctcctgcaaggcttctggatacaccttcaccggctactttatgcactgggtgcgacaggcccctggacaagggcttgagtggatgggatggatcaaccctaacagtggtgacacaaactatgcacagaagtttcagggcagggtcaccatgaccagggacacgtccctcaacacagcctacatggagctgagcaggctgagatctgacgacacggccatttattactgtgcgagagggacttactatggttcggggagttattttaacgaacttgactcctggggccagggaaccctggtcaccgtctcctca

SEQ ID NO: 31804 - protein, 124 aa, synthetic construct
  REGION 1..124: note = Description of Artificial Sequence: Synthetic polypeptide
QVQLVQSGAEVKKPGASVKVSCKASGYTFTGYFMHWVRQAPGQGLEWMGWINPNSGDTNYAQKFQGRVTMTRDTSLNTAYMELSRLRSDDTAIYYCARGTYYGSGSYFNELDSWGQGTLVTVSS

SEQ ID NO: 31805 - DNA, 372 bp, synthetic construct
  misc_feature 1..372: note = Description of Artificial Sequence: Synthetic polynucleotide
  source 1..372: mol_type = other DNA
caggtgcagctggtgcagtctggggctgaggtgaagaagcctggggcctcagtgaaggtctcctgcaaggcttctggatacaccttcaccggctactatatgcactgggtgcgacaggcccctggacaaggacttgagtggatgggatggatcaaccctaacagtggaggcacaaactatgcacagaagtttcaggacagggtcaccatgaccagggacacgtccatcagcacagcccacatggagctgagcaggctgagatctgacgacacggccgtgtattattgtgcgagaggatattactatggttcggggagttattataactggttcgactcctggggccagggaaccctggtcaccgtctcctca

SEQ ID NO: 31806 - protein, 124 aa, synthetic construct
  REGION 1..124: note = Description of Artificial Sequence: Synthetic polypeptide
QVQLVQSGAEVKKPGASVKVSCKASGYTFTGYYMHWVRQAPGQGLEWMGWINPNSGGTNYAQKFQDRVTMTRDTSISTAHMELSRLRSDDTAVYYCARGYYYGSGSYYNWFDSWGQGTLVTVSS

SEQ ID NO: 31807 - DNA, 366 bp, synthetic construct
  misc_feature 1..366: note = Description of Artificial Sequence: Synthetic polynucleotide
  source 1..366: mol_type = other DNA
caggtgcaactggtgcagtctggggctgaggtgaagaagcctggggcctcagtgaaagtctcctgcaaggcttctggatacaccttcaccggctactatatacactgggtgcgacaggcccctggacaagggcttgagtggatgggatggatcaaccctaacagtggtggcacaaactatgcacggaagtttcagggcagggtcaccatgaccagggacacgtccatcagcacagcctacatggagctgagcagactgagatctgacgacacggccgtgtattactgtgcgagaggagcgtttgattactactactactacgctttggacgtctggggccaagggaccacggtcaccgtctcctca

SEQ ID NO: 31808 - protein, 122 aa, synthetic construct
  REGION 1..122: note = Description of Artificial Sequence: Synthetic polypeptide
QVQLVQSGAEVKKPGASVKVSCKASGYTFTGYYIHWVRQAPGQGLEWMGWINPNSGGTNYARKFQGRVTMTRDTSISTAYMELSRLRSDDTAVYYCARGAFDYYYYYALDVWGQGTTVTVSS

SEQ ID NO: 31809 - DNA, 372 bp, synthetic construct
  misc_feature 1..372: note = Description of Artificial Sequence: Synthetic polynucleotide
  source 1..372: mol_type = other DNA
caggtgcaactggtgcagtctggggctgaggtgaagaagcctggggcctcagtgaaggtctcctgcaaggcttctggatacaccttcaccggctactttatgcactgggtgcgacaggcccctggacaagggcttgagtggatgggttggatcaaccctaacagtggtgacacaaactatgcacagaagtttcagggcagggtcaccatgaccagggacacgtccctcagcacagcctacatggagctgagcaggctgagatctgacgacacggccatttattactgtgcgagagggacttactatggttcggggagttattttaacgaacttgactcctggggccagggaaccctggtcaccgtctcctca

SEQ ID NO: 31810 - protein, 124 aa, synthetic construct
  REGION 1..124: note = Description of Artificial Sequence: Synthetic polypeptide
QVQLVQSGAEVKKPGASVKVSCKASGYTFTGYFMHWVRQAPGQGLEWMGWINPNSGDTNYAQKFQGRVTMTRDTSLSTAYMELSRLRSDDTAIYYCARGTYYGSGSYFNELDSWGQGTLVTVSS

SEQ ID NO: 31811 - DNA, 366 bp, synthetic construct
  misc_feature 1..366: note = Description of Artificial Sequence: Synthetic polynucleotide
  source 1..366: mol_type = other DNA
caggtgcaattggtgcagtctggggctgaggtgaagaagcctggggcctcagtgaaggtctcctgcaaggcttctggatacaccttcaccggctactatatgcactgggtgcgacaggcccctggacaagggcttgagcggatgggatggatcaaccctaagagtggtggcacaaactttgcacagaagtttcagggcagggtcaccatgaccagggacacgtccatcagcacagcctacatggaactgagcaggctgagatctgacgacacggccgtgtattactgcgcgagaggagcgtttgattacttctactactacggtatggacgtctggggccaagggaccacggtcaccgtctcctca

SEQ ID NO: 31812 - protein, 122 aa, synthetic construct
  REGION 1..122: note = Description of Artificial Sequence: Synthetic polypeptide
QVQLVQSGAEVKKPGASVKVSCKASGYTFTGYYMHWVRQAPGQGLERMGWINPKSGGTNFAQKFQGRVTMTRDTSISTAYMELSRLRSDDTAVYYCARGAFDYFYYYGMDVWGQGTTVTVSS

SEQ ID NO: 31813 - DNA, 384 bp, synthetic construct; identical to SEQ ID NO: 28795
  misc_feature 1..384: note = Description of Artificial Sequence: Synthetic polynucleotide
  source 1..384: mol_type = other DNA

SEQ ID NO: 31814 - protein, 128 aa, synthetic construct; identical to SEQ ID NO: 28796
  REGION 1..128: note = Description of Artificial Sequence: Synthetic polypeptide

SEQ ID NO: 31815 - DNA, 366 bp, synthetic construct
  misc_feature 1..366: note = Description of Artificial Sequence: Synthetic polynucleotide
  source 1..366: mol_type = other DNA
caggtgcaattggtgcagtctggggctgaggtgaagaagcctggggcctcagtgaaggtctcctgcaaggcttctggatacaccttcaccggctactatatgcactgggtgcgacaggcccctggacaagggcttgagcggatgggatggatcaaccctaagagtggtggcacaaactatgcacagaagtttcagggcagggtcaccatgaccagggacacgtccatcagcacagcctacatggagctgagcaggctgagatctgacgacacggccgtgtattactgcgcgagaggagcgtttgattacttctactactacggtatggacgtctggggccaagggaccacggtcaccgtctcctca

SEQ ID NO: 31816 - protein, 122 aa, synthetic construct
  REGION 1..122: note = Description of Artificial Sequence: Synthetic polypeptide
QVQLVQSGAEVKKPGASVKVSCKASGYTFTGYYMHWVRQAPGQGLERMGWINPKSGGTNYAQKFQGRVTMTRDTSISTAYMELSRLRSDDTAVYYCARGAFDYFYYYGMDVWGQGTTVTVSS

SEQ ID NO: 31817 - DNA, 357 bp, synthetic construct; identical to SEQ ID NO: 28231
  misc_feature 1..357: note = Description of Artificial Sequence: Synthetic polynucleotide
  source 1..357: mol_type = other DNA

SEQ ID NO: 31818 - protein, 119 aa, synthetic construct; identical to SEQ ID NO: 28232
  REGION 1..119: note = Description of Artificial Sequence: Synthetic polypeptide

SEQ ID NO: 31819 - DNA, 366 bp, synthetic construct
  misc_feature 1..366: note = Description of Artificial Sequence: Synthetic polynucleotide
  source 1..366: mol_type = other DNA
gaggtgcagctgttggagtctgggggaggcttggtacagcctggggggtccctgagactctcctgtgcagcctctggattcacctttagcagctatgccatgaactgggtccgccaggctccagggaaggggctggagtgggtctcagctattagtggtcgtggtggtaacacattctacgcagactccgtgaagggccggttcaccatctccagagacaattccaagaacacgctgtatctgcaaatgaacagcctgagagccgaggacacggccgtatattactgtgcgaaaagagagacgtataactggaactacgaagggtttgactactggggccagggaaccctggtcaccgtctcctca

SEQ ID NO: 31820 - protein, 122 aa, synthetic construct
  REGION 1..122: note = Description of Artificial Sequence: Synthetic polypeptide
EVQLLESGGGLVQPGGSLRLSCAASGFTFSSYAMNWVRQAPGKGLEWVSAISGRGGNTFYADSVKGRFTISRDNSKNTLYLQMNSLRAEDTAVYYCAKRETYNWNYEGFDYWGQGTLVTVSS

SEQ ID NO: 31821 - DNA, 345 bp, synthetic construct; identical to SEQ ID NO: 29355
  misc_feature 1..345: note = Description of Artificial Sequence: Synthetic polynucleotide
  source 1..345: mol_type = other DNA

SEQ ID NO: 31822 - protein, 115 aa, synthetic construct; identical to SEQ ID NO: 29356
  REGION 1..115: note = Description of Artificial Sequence: Synthetic polypeptide

SEQ ID NO: 31823 - DNA, 345 bp, synthetic construct
  misc_feature 1..345: note = Description of Artificial Sequence: Synthetic polynucleotide
  source 1..345: mol_type = other DNA
gaggtgcacctggtggagtctgggggaggcctggtcaagcctggggggtccctgagactctcctgtgcagcctctggattcaccttcagtagctatagcatgaactgggtccgccaggctccagggaaggggctggagtgggtctcatccattagtggtagtagtacttacatatactacgcagactcagtgaagggccgattcaccatctccagagacaacgccaagaactcactgtatctgcaaatgaacagcctgagagccgaggacacggctgtgtattactgtgcgagaactggggtctttgactactggggccagggaaccctggtcaccgtctcctca

SEQ ID NO: 31824 - protein, 115 aa, synthetic construct
  REGION 1..115: note = Description of Artificial Sequence: Synthetic polypeptide
EVHLVESGGGLVKPGGSLRLSCAASGFTFSSYSMNWVRQAPGKGLEWVSSISGSSTYIYYADSVKGRFTISRDNAKNSLYLQMNSLRAEDTAVYYCARTGVFDYWGQGTLVTVSS

SEQ ID NO: 31825 - DNA, 345 bp, synthetic construct
  misc_feature 1..345: note = Description of Artificial Sequence: Synthetic polynucleotide
  source 1..345: mol_type = other DNA
gaggtgcagctggtggaatctgggggaggcctggtcaagccgggggggtccctgagactctcctgtgcagcctctggattcaccttcagtaactatagaatgaactgggtccgccagggtccagggaaggggctggagtggatctcatccattagtggtagtagtactgacatatactacgcagactcagtgaagggccgattcaccatctccagagacaacgccaagaactcactgtatctgcaaatgaacagcctgagagccgaggacacggctgtgtattactgtgcgagagtggcctcctttgactactggggccagggaaccctggtcaccgtctcctca

SEQ ID NO: 31826 - protein, 115 aa, synthetic construct
  REGION 1..115: note = Description of Artificial Sequence: Synthetic polypeptide
EVQLVESGGGLVKPGGSLRLSCAASGFTFSNYRMNWVRQGPGKGLEWISSISGSSTDIYYADSVKGRFTISRDNAKNSLYLQMNSLRAEDTAVYYCARVASFDYWGQGTLVTVSS

SEQ ID NO: 31827 - DNA, 351 bp, synthetic construct
  misc_feature 1..351: note = Description of Artificial Sequence: Synthetic polynucleotide
  source 1..351: mol_type = other DNA
gaggtgcagctggtggagtctgggggaggcctggtcaagcctggggggtccctgagactctcctgtgcagcctctggattcaccttcagtagctttggcatgaactgggtccgccaggctccagggaaggggctggagtgggtctcatctattagtagtagtactggttacatatacaacgcagactcagtgaagggccgattcaccatctccagagacaacgccaagaactcactgtatctgcaaatgaacagcctgagagccgaagacacggctgtgtattactgtgcgagaacctatagtgggagcctggacgtctggggccaagggaccacggtcaccgtctcctca

SEQ ID NO: 31828 - protein, 117 aa, synthetic construct
  REGION 1..117: note = Description of Artificial Sequence: Synthetic polypeptide
EVQLVESGGGLVKPGGSLRLSCAASGFTFSSFGMNWVRQAPGKGLEWVSSISSSTGYIYNADSVKGRFTISRDNAKNSLYLQMNSLRAEDTAVYYCARTYSGSLDVWGQGTTVTVSS

SEQ ID NO: 31829 - DNA, 363 bp, synthetic construct
  misc_feature 1..363: note = Description of Artificial Sequence: Synthetic polynucleotide
  source 1..363: mol_type = other DNA
gaggtgcagctgttggagtctgggggaggcttggtacagcctggggggtccctgagactctcctgtgcagcctctggattcccctttagcagctatgccatgagctgggtccgccaggctccagggaaggggctggagtgggtctcagctattagtggtagtggtggtaacacattctacgcagactccgtgaagggccggttcaccatctccagagacaattccaagaacacgctgtatctgcaaatgaacagcctgagagccgaggacacggccgtatattactgtgcgaaatttttcggtgtagtgggagtcgggtgctttgactactggggccagggaaccctggtcaccgtctcctca

SEQ ID NO: 31830 - protein, 121 aa, synthetic construct
  REGION 1..121: note = Description of Artificial Sequence: Synthetic polypeptide
EVQLLESGGGLVQPGGSLRLSCAASGFPFSSYAMSWVRQAPGKGLEWVSAISGSGGNTFYADSVKGRFTISRDNSKNTLYLQMNSLRAEDTAVYYCAKFFGVVGVGCFDYWGQGTLVTVSS

SEQ ID NO: 31831 - DNA, 351 bp, synthetic construct
  misc_feature 1..351: note = Description of Artificial Sequence: Synthetic polynucleotide
  source 1..351: mol_type = other DNA
gaggtgcagctggtggagtctgggggaggcctggtcaagcctggggggtccctgagactctcctgtgcagcctctggattcaccttcagtagctatagcatgaactgggtccgccaggctccagggaaggggctggagtgggtctcatccattagtagtagtagtagttacatatactacgcagactcagtgaagggccgattcaccatctccagagacaacgccaagaactcactgtatctgcaaatgaacagcctgagagccgaggacacggctgtgtattactgtgcgagagggggttcgagggggttcgacccctggggccagggaaccctggtcaccgtctcctca

SEQ ID NO: 31832 - protein, 117 aa, synthetic construct
  REGION 1..117: note = Description of Artificial Sequence: Synthetic polypeptide
EVQLVESGGGLVKPGGSLRLSCAASGFTFSSYSMNWVRQAPGKGLEWVSSISSSSSYIYYADSVKGRFTISRDNAKNSLYLQMNSLRAEDTAVYYCARGGSRGFDPWGQGTLVTVSS

SEQ ID NO: 31833 - DNA, 363 bp, synthetic construct
  misc_feature 1..363: note = Description of Artificial Sequence: Synthetic polynucleotide
  source 1..363: mol_type = other DNA
gaggtgcagatgttggagtctgggggaggcttgggacagtcgggggggtccctgagactctcctgtacagcctctggattcaccttcaccacttctgccatgagctgggtccgccaggctccagggaaggggctggagtgggtctcagctattagtggtagtggtgctaacacattctacgcagactccgtgaagggccggttcaccgtcaccagagacaattccaagaacacgctgtatctgcaaatgaacagcctgacagccgaggacacggccgtttattattgtgtgaaagttatagcagtggctggagggcactttttcgacccctggggccagggaaccctggtcaccgtctcctca

SEQ ID NO: 31834 - protein, 121 aa, synthetic construct
  REGION 1..121: note = Description of Artificial Sequence: Synthetic polypeptide
EVQMLESGGGLGQSGGSLRLSCTASGFTFTTSAMSWVRQAPGKGLEWVSAISGSGANTFYADSVKGRFTVTRDNSKNTLYLQMNSLTAEDTAVYYCVKVIAVAGGHFFDPWGQGTLVTVSS

SEQ ID NO: 31835 - DNA, 351 bp, synthetic construct
  misc_feature 1..351: note = Description of Artificial Sequence: Synthetic polynucleotide
  source 1..351: mol_type = other DNA
caggtgcagctggtgcagtctggggctgaggtgaagaagcctggggcctcagtgaaggtctcctgcaaggcttctggatacaccttcaccggctactatatgcactgggtgcgacaggcccctggacaagggcttgagtggatgggatggatcaaccctaacaataatggcacaaactatgcacagaagtttcagggcagggtcaccatgaccagggacacgtccatcagcacagcctacatggagctgagcaggctgagatctgacgacacggccgtgtattactgtgcgagagatgggagcagtggctttgactactggggccagggaaccctggtcaccgtctcctca

SEQ ID NO: 31836 - protein, 117 aa, synthetic construct
  REGION 1..117: note = Description of Artificial Sequence: Synthetic polypeptide
QVQLVQSGAEVKKPGASVKVSCKASGYTFTGYYMHWVRQAPGQGLEWMGWINPNNNGTNYAQKFQGRVTMTRDTSISTAYMELSRLRSDDTAVYYCARDGSSGFDYWGQGTLVTVSS

SEQ ID NO: 31837 - DNA, 372 bp, synthetic construct; identical to SEQ ID NO: 29771
  misc_feature 1..372: note = Description of Artificial Sequence: Synthetic polynucleotide
  source 1..372: mol_type = other DNA

SEQ ID NO: 31838 - protein, 124 aa, synthetic construct; identical to SEQ ID NO: 29772
  REGION 1..124: note = Description of Artificial Sequence: Synthetic polypeptide

SEQ ID NO: 31839 - DNA, 363 bp, synthetic construct
  misc_feature 1..363: note = Description of Artificial Sequence: Synthetic polynucleotide
  source 1..363: mol_type = other DNA
gaggtgcaactgttggagtctgggggaggcttggtacagcctggggggtccctgagactctcctgtgcagcctctggattcacctttagcagctatgccatgagctgggtccgccaggctccagggaaggggctggagtgggtctcagttattagtggtggtggtagtagtacatactacgcagactccgtgaagggccggttcaccatctccagagacaattccaagaacacgctgtatctgcaaatgaacagcctgagagccgaggacacggccgtatattactgtgcgaaatggcgaggtaaccccactgactacggtatggacgtctggggccaagggaccacggtcaccgtctcctca

SEQ ID NO: 31840 - protein, 121 aa, synthetic construct; identical to SEQ ID NO: 31304
  REGION 1..121: note = Description of Artificial Sequence: Synthetic polypeptide

SEQ ID NO: 31841 - DNA, 363 bp, synthetic construct; identical to SEQ ID NO: 31327
  misc_feature 1..363: note = Description of Artificial Sequence: Synthetic polynucleotide
  source 1..363: mol_type = other DNA

SEQ ID NO: 31842 - protein, 121 aa, synthetic construct; identical to SEQ ID NO: 31304
  REGION 1..121: note = Description of Artificial Sequence: Synthetic polypeptide

SEQ ID NO: 31843 - DNA, 378 bp, synthetic construct
  misc_feature 1..378: note = Description of Artificial Sequence: Synthetic polynucleotide
  source 1..378: mol_type = other DNA
caggtgcagctgggggaggctgggggaggcgtggtccagcctgggaggtccctgagactctcctgtgcagcgtctggattcaccttcagtcgctatggcatgcactgggtccgccaggctccaggcaaggggctggagtgggtggcttttatatggtatgatggaagtgagaactactatgcagactccgtgaagggccgattcaccatctccagagtcaattccaggaacacgctgtatctgcaaatgaacagcctgagagccgaggacacggctgtgtattactgtgcgagagatcgggtggagggttcggggactccctactactactacggtatggacgtctggggccaagggaccacggtcaccgtctcctca

SEQ ID NO: 31844 - protein, 126 aa, synthetic construct
  REGION 1..126: note = Description of Artificial Sequence: Synthetic polypeptide
QVQLGEAGGGVVQPGRSLRLSCAASGFTFSRYGMHWVRQAPGKGLEWVAFIWYDGSENYYADSVKGRFTISRVNSRNTLYLQMNSLRAEDTAVYYCARDRVEGSGTPYYYYGMDVWGQGTTVTVSS

SEQ ID NO: 31845 - DNA, 378 bp, synthetic construct; identical to SEQ ID NO: 31843
  misc_feature 1..378: note = Description of Artificial Sequence: Synthetic polynucleotide
  source 1..378: mol_type = other DNA

SEQ ID NO: 31846 - protein, 126 aa, synthetic construct; identical to SEQ ID NO: 31844
  REGION 1..126: note = Description of Artificial Sequence: Synthetic polypeptide

SEQ ID NO: 31847 - DNA, 387 bp, synthetic construct
  misc_feature 1..387: note = Description of Artificial Sequence: Synthetic polynucleotide
  source 1..387: mol_type = other DNA
caggtacacctggtggagtctgggggaggcgtggtccagcctgggaggtccctgagactctcctgtgcagcgtctggattcaccatcagtacctatggcatgcactgggtccgccagggtccaggcaaggggctggagtgggtggcagttatatggtatggtggaagtgatacagactatgcagactccgtgaggggccgattcaccatctccagagacatttccaagaacacgctgtatctgcaaatgaacagcctgagagccgaggacacggctgtgtattactgtgcgagagatcgggattattgtagtggtggtaactgcccttactactactactacggtatggacgtctggggccaagggaccacggtcaccgtctcctca

SEQ ID NO: 31848 - protein, 129 aa, synthetic construct
  REGION 1..129: note = Description of Artificial Sequence: Synthetic polypeptide
QVHLVESGGGVVQPGRSLRLSCAASGFTISTYGMHWVRQGPGKGLEWVAVIWYGGSDTDYADSVRGRFTISRDISKNTLYLQMNSLRAEDTAVYYCARDRDYCSGGNCPYYYYYGMDVWGQGTTVTVSS

SEQ ID NO: 31849 - DNA, 366 bp, synthetic construct
  misc_feature 1..366: note = Description of Artificial Sequence: Synthetic polynucleotide
  source 1..366: mol_type = other DNA
caggtgcagttggtgcagtctggggctgaggtgaagaagcctggggcctcagtgaaggtctcctgcaaggcttctggatacaccttcaccggctactttatgcactgggtgcgacaggcccctggacaagggcttgagtggatgggatggatcaagcctaaaagcggtggcacaaactgtgcacagaagtttcagggcagggtcaccatgaccagggacacgtccagcagcacagcctacatggagctgagcaggctgacatctgacgacacggccgtgtattactgtgcgagagggggggctacggtgactacgtggggggtctttgactactggggccagggaaccctggtcaccgtctcctca

SEQ ID NO: 31850 - protein, 122 aa, synthetic construct
  REGION 1..122: note = Description of Artificial Sequence: Synthetic polypeptide
QVQLVQSGAEVKKPGASVKVSCKASGYTFTGYFMHWVRQAPGQGLEWMGWIKPKSGGTNCAQKFQGRVTMTRDTSSSTAYMELSRLTSDDTAVYYCARGGATVTTWGVFDYWGQGTLVTVSS

SEQ ID NO: 31851 - DNA, 363 bp, synthetic construct
  misc_feature 1..363: note = Description of Artificial Sequence: Synthetic polynucleotide
  source 1..363: mol_type = other DNA
gaggtgcaactggtggagtctgggggaggctcggtacagcctggggggtccctgagactctcctgtgcagcctctggattcaccttcagtagctatagcatgaactgggtccgccaggctccagggaaggggctggagtgggtttcatacattagcagtagtggtagtaccaaatactacgcagactctgtggagggccgattcaccatctccagagacaatgccaagaattcactggatctgcaaatgaacagcctgagagacgaggacacggctgtgtatcgctgtgcgagagatagtaggaaggggttctactacggtctggacgtctggggccaagggaccacggtcaccgtctcctca

SEQ ID NO: 31852 - protein, 121 aa, synthetic construct
  REGION 1..121: note = Description of Artificial Sequence: Synthetic polypeptide
EVQLVESGGGSVQPGGSLRLSCAASGFTFSSYSMNWVRQAPGKGLEWVSYISSSGSTKYYADSVEGRFTISRDNAKNSLDLQMNSLRDEDTAVYRCARDSRKGFYYGLDVWGQGTTVTVSS

SEQ ID NO: 31853 - DNA, 366 bp, synthetic construct
  misc_feature 1..366: note = Description of Artificial Sequence: Synthetic polynucleotide
  source 1..366: mol_type = other DNA
caggtgcagctggtgcagtctggggctgaggtgaagaagcctggggcctcagtgagggtctcctgcaaggcttctggatacaccttcaccggctactttatgcactgggtgcgacaggcccctggacaagggcttgagtggatgggatggatcaagcctaagagtggtggcacaaactctgcacagaggtttcagggcagggtcaccatgaccagggacacgtccatcaacacagcctacatggagctgaacaggctgagatctgacgacacggccgtatattactgtgcgagaggggggactacggtggctacgtggggggtctttgactactggggccagggaaccctggtcaccgtctcctca

SEQ ID NO: 31854 - protein, 122 aa, synthetic construct; identical to SEQ ID NO: 30468
  REGION 1..122: note = Description of Artificial Sequence: Synthetic polypeptide

SEQ ID NO: 31855 - DNA, 366 bp, synthetic construct
  misc_feature 1..366: note = Description of Artificial Sequence: Synthetic polynucleotide
  source 1..366: mol_type = other DNA
caggtgcagctggtacagtctggggctgaggtgaagaagcctggggcctcagtgcgggtctcctgcaaggcttctggatacaccttcaccggctactttatgcactgggtgcgacaggcccctggacaagggcttgagtggatgggatggatcaagcctaagagtggtggcacaaactctgcacagaggtttcagggcagggtcaccatgaccagggacacgtccatcaacacagcctacatggagctgaactggctgagatctgacgacacggccgtatattactgtgcgagaggggggactacggtggctacgtggggggtctttgactactggggccagggaaccctggtcaccgtctcctca

SEQ ID NO: 31856 - protein, 122 aa, synthetic construct
  REGION 1..122: note = Description of Artificial Sequence: Synthetic polypeptide
QVQLVQSGAEVKKPGASVRVSCKASGYTFTGYFMHWVRQAPGQGLEWMGWIKPKSGGTNSAQRFQGRVTMTRDTSINTAYMELNWLRSDDTAVYYCARGGTTVATWGVFDYWGQGTLVTVSS

SEQ ID NO: 31857 - DNA, 384 bp, synthetic construct
  misc_feature 1..384: note = Description of Artificial Sequence: Synthetic polynucleotide
  source 1..384: mol_type = other DNA
caggtgcagctggtggagtctgggggaggcgtggtccagcctgggaggtccctgagactctcctgtgcagcgtctggattcaccttcagtagctatggcatggactgggtccgccaggctccaggcaaggggctggagtgggtggcaattatatggtttgatggaagtaataaatactatgcagactccgtgaagggccgattcaccatctccagagacaattccaagaacacgctgtatctgcaaatgaacagcctgagagccgaggacacggctgtgtattactgtgcgagagcatattgtggtggtgactgctatttcccccatctccattactacggtatggacgtctggggccaagggaccacggtcaccgtctcctca

SEQ ID NO: 31858 - protein, 128 aa, synthetic construct
  REGION 1..128: note = Description of Artificial Sequence: Synthetic polypeptide
QVQLVESGGGVVQPGRSLRLSCAASGFTFSSYGMDWVRQAPGKGLEWVAIIWFDGSNKYYADSVKGRFTISRDNSKNTLYLQMNSLRAEDTAVYYCARAYCGGDCYFPHLHYYGMDVWGQGTTVTVSS

SEQ ID NO: 31859 - DNA, 366 bp, synthetic construct
  misc_feature 1..366: note = Description of Artificial Sequence: Synthetic polynucleotide
  source 1..366: mol_type = other DNA
caggtacagctggtgcagtctggggctgaggtgaagaagcctggggcctcagtgaaggtctcctgcaaggcttctggatacaccttcaccggctactttatgcactgggtgcgacaggcccctggacaagggcttgagtggatgggatggatcaagcctaaaagtggtggcacaaactgtgcacagaagtttcagggcagggtcaccatgaccagggacacgtccatcagcacagcctacatggaactgagcaggctgagatctgacgacacggccgtgtattattgtgtgagaggggggactacggtgactacgtggggggtctttgactactggggccagggaaccatggtcaccgtctcctca

SEQ ID NO: 31860 - protein, 122 aa, synthetic construct
  REGION 1..122: note = Description of Artificial Sequence: Synthetic polypeptide
QVQLVQSGAEVKKPGASVKVSCKASGYTFTGYFMHWVRQAPGQGLEWMGWIKPKSGGTNCAQKFQGRVTMTRDTSISTAYMELSRLRSDDTAVYYCVRGGTTVTTWGVFDYWGQGTMVTVSS

SEQ ID NO: 31861 - DNA, 360 bp, synthetic construct
  misc_feature 1..360: note = Description of Artificial Sequence: Synthetic polynucleotide
  source 1..360: mol_type = other DNA
caggtgcaggtggtggagtctgggggaggcgtggtccagcctgggaggtccctgagactctcctgtgcagcgtctggattcaccttcagtagctatggcatgcactgggtccgccaggctccaggcaaggggctggagtgggtggcagttatatggtatgatggaagtaatagaaactatgcagactccgtgaagggccgattcaccatctccagagacaattccaagaacacgctgtatctgcaaatgaacagcctgagagtcgaggacacggctgtgtattactgtgcgagagatcggtctaagggttacgacggtatggacgtctggggccaagggaccacggtcaccgtctcctca

SEQ ID NO: 31862 - protein, 120 aa, synthetic construct
  REGION 1..120: note = Description of Artificial Sequence: Synthetic polypeptide
QVQVVESGGGVVQPGRSLRLSCAASGFTFSSYGMHWVRQAPGKGLEWVAVIWYDGSNRNYADSVKGRFTISRDNSKNTLYLQMNSLRVEDTAVYYCARDRSKGYDGMDVWGQGTTVTVSS

SEQ ID NO: 31863 - DNA, 351 bp, synthetic construct
  misc_feature 1..351: note = Description of Artificial Sequence: Synthetic polynucleotide
  source 1..351: mol_type = other DNA
caggtgcagctggtggagtctgggggaggcgtggtccagcctgggaggtccctgagactctcctgtgcagcgtctggattcaccttcagtgactatggcatgcactgggtccgccaggctccaggcaaggggctggagtgggtggcagttatatggtatgatggaggtaatacacattatacagactccgtgaagggccgattcaccatctccagagacaattccaagaacacgctgtatctgcaaatgaacagcctgagagccgaggacacggctgtatattactgtgcgagagaagtgggttggcttgatgactactggggccagggaaccctggtcaccgtctcctca

SEQ ID NO: 31864 - protein, 117 aa, synthetic construct
  REGION 1..117: note = Description of Artificial Sequence: Synthetic polypeptide
QVQLVESGGGVVQPGRSLRLSCAASGFTFSDYGMHWVRQAPGKGLEWVAVIWYDGGNTHYTDSVKGRFTISRDNSKNTLYLQMNSLRAEDTAVYYCAREVGWLDDYWGQGTLVTVSS

SEQ ID NO: 31865 - DNA, 372 bp, synthetic construct
  misc_feature 1..372: note = Description of Artificial Sequence: Synthetic polynucleotide
  source 1..372: mol_type = other DNA
gaggtgcagctgttggagtctgggggaggcttggtacagcctggggggtccctgagactctcctgtgcagcctctggattcacctttagcagctatgccatgagctgggtccgccaggctccagggaaggggctggagtgggtctcagctattagtggtagtggtggtagcacatactacgcagactccgtgaagggccggttcaccatctccagagacaattccaagaacacgctgtatctgcaaatgaacagcctgagagccgaggacacggccgtatattactgtgcgaaagctggtggaactacggggagctactactacaacggtatggacgtctggggccaagggaccacggtcaccgtctcctca

SEQ ID NO: 31866 - protein, 124 aa, synthetic construct
  REGION 1..124: note = Description of Artificial Sequence: Synthetic polypeptide
EVQLLESGGGLVQPGGSLRLSCAASGFTFSSYAMSWVRQAPGKGLEWVSAISGSGGSTYYADSVKGRFTISRDNSKNTLYLQMNSLRAEDTAVYYCAKAGGTTGSYYYNGMDVWGQGTTVTVSS

SEQ ID NO: 31867 - DNA, 369 bp, synthetic construct
  misc_feature 1..369: note = Description of Artificial Sequence: Synthetic polynucleotide
  source 1..369: mol_type = other DNA
caggtgcagctggtggagtctgggggaggcgtggtccagcctgggaggtccctgagactctcctgtgcagcgtctagattcaccttcagtgactatgtcatgcactgggtccgccaggctccaggcaaggggctggagtgggtggcagttatatggtatgatggaagtaataaatactatgtagactccgtgaagggccgattcaccatctccagagacaattccaggaacacgctgtatctgcaaatgaacagcctgagagccgaggacacggctgtatattactgtgcgagagaacggtatagcagtggcttgtacgactacggtatggacgtctggggccaagggaccacggtcaccgtctcctca

SEQ ID NO: 31868 - protein, 123 aa, synthetic construct
  REGION 1..123: note = Description of Artificial Sequence: Synthetic polypeptide
QVQLVESGGGVVQPGRSLRLSCAASRFTFSDYVMHWVRQAPGKGLEWVAVIWYDGSNKYYVDSVKGRFTISRDNSRNTLYLQMNSLRAEDTAVYYCARERYSSGLYDYGMDVWGQGTTVTVSS

SEQ ID NO: 31869 - DNA, 369 bp, synthetic construct; identical to SEQ ID NO: 28155
  misc_feature 1..369: note = Description of Artificial Sequence: Synthetic polynucleotide
  source 1..369: mol_type = other DNA

SEQ ID NO: 31870 - protein, 123 aa, synthetic construct; identical to SEQ ID NO: 28156
  REGION 1..123: note = Description of Artificial Sequence: Synthetic polypeptide

SEQ ID NO: 31871 - DNA, 357 bp, synthetic construct
  misc_feature 1..357: note = Description of Artificial Sequence: Synthetic polynucleotide
  source 1..357: mol_type = other DNA
caggtgcagctgcaggagtcgggcccaggactggtgaagccttcacagaccctgtccctcacctgcactgtctctggtggctccatcagcagtggtggttactactggagctggatccgccagcacccagggaagggcctggagtggattgggtacatctattacagtgggagcacctactacaacccgtccctcaagagtcgagttaccatatcagtagacacgtctaagaaccaattctccctgaaactgaactctgtgactgccgcggacacggccgtgtatttctgtgcgagagattcccctgacagggggtttgactactggggccagggaaccctggtcaccgtctcctca

SEQ ID NO: 31872 - protein, 119 aa, synthetic construct
  REGION 1..119: note = Description of Artificial Sequence: Synthetic polypeptide
QVQLQESGPGLVKPSQTLSLTCTVSGGSISSGGYYWSWIRQHPGKGLEWIGYIYYSGSTYYNPSLKSRVTISVDTSKNQFSLKLNSVTAADTAVYFCARDSPDRGFDYWGQGTLVTVSS

SEQ ID NO: 31873 - DNA, 363 bp, synthetic construct
  misc_feature 1..363: note = Description of Artificial Sequence: Synthetic polynucleotide
  source 1..363: mol_type = other DNA
caggtgcagctggtggaatctgggggaggcgtggtccagcctgggaggtccctgagactctcctgtgcagcctctggattcaccttcagtagctatggcatgcactgggtccgccaggctccaggcaaggggctggagtgggtgacaattatatcatatagtggaagtaataaatactatgcagactccgtgaagggccgattcaccatctccagagacaattccaagaacacgctgtatctgcaaatgaacagcctgagagctgaggacacggctgtgtattactgtgcgagacggggatacagctatggcgggtacggtatggacgtctggggccaagggaccacggtcaccgtctcctca

SEQ ID NO: 31874 - protein, 121 aa, synthetic construct
  REGION 1..121: note = Description of Artificial Sequence: Synthetic polypeptide
QVQLVESGGGVVQPGRSLRLSCAASGFTFSSYGMHWVRQAPGKGLEWVTIISYSGSNKYYADSVKGRFTISRDNSKNTLYLQMNSLRAEDTAVYYCARRGYSYGGYGMDVWGQGTTVTVSS

SEQ ID NO: 31875 - DNA, 372 bp, synthetic construct
  misc_feature 1..372: note = Description of Artificial Sequence: Synthetic polynucleotide
  source 1..372: mol_type = other DNA
caggtgcaggtacagcagtggggcgcaggactgttgaagcattcggagaccctgtccctcacctgcgctgtctatggtgggtccttcactgattactactggagctggatccgccagcccccagggaaggggctggagtggattggggaaatcaatcatagtggagacaccaactacaacccgtccctcaagagtcgagtcaccatatcagtagacacgtccaagaaccagttctccctgaagctgagttctgtgaccgccgcggacacggctgtgtattactgtgcgagagagtttccatatagtggaagctacctctactactacggtatggacgtctggggccaagggaccacggtcaccgtctcctca

SEQ ID NO: 31876 - protein, 124 aa, synthetic construct
  REGION 1..124: note = Description of Artificial Sequence: Synthetic polypeptide
QVQVQQWGAGLLKHSETLSLTCAVYGGSFTDYYWSWIRQPPGKGLEWIGEINHSGDTNYNPSLKSRVTISVDTSKNQFSLKLSSVTAADTAVYYCAREFPYSGSYLYYYGMDVWGQGTTVTVSS

SEQ ID NO: 31877 - DNA, 354 bp, synthetic construct; identical to SEQ ID NO: 29721
  misc_feature 1..354: note = Description of Artificial Sequence: Synthetic polynucleotide
  source 1..354: mol_type = other DNA

SEQ ID NO: 31878 - protein, 118 aa, synthetic construct; identical to SEQ ID NO: 29722
  REGION 1..118: note = Description of Artificial Sequence: Synthetic polypeptide

SEQ ID NO: 31879 - DNA, 345 bp, synthetic construct; identical to SEQ ID NO: 29737
  misc_feature 1..345: note = Description of Artificial Sequence: Synthetic polynucleotide
  source 1..345: mol_type = other DNA

SEQ ID NO: 31880 - protein, 115 aa, synthetic construct; identical to SEQ ID NO: 29738
  REGION 1..115: note = Description of Artificial Sequence: Synthetic polypeptide

SEQ ID NO: 31881 - DNA, 366 bp, synthetic construct
  misc_feature 1..366: note = Description of Artificial Sequence: Synthetic polynucleotide
  source 1..366: mol_type = other DNA
caggtgcaactggtggagtctgggggaggcgtggtccagcctgggaggtccctgagactctcctgtgcagcgtctggattcaccttcagtagttatggcatgcattgggtccgccaggctccaggcaaggggctggagtgggtggcagttatatggtatgatggaagtgataaatactatgcagactccgtgaagggccgattcaccatctccagagacaattccaagaacacgctgtatctgcaaatgaacagcctgagagccgaggacacggctgtgtattactgtgcgagagatcggttagtgggagctacggttgatgcttttgatatctggggccaagggacaatggtcaccgtctcttca

SEQ ID NO: 31882 - protein, 122 aa, synthetic construct
  REGION 1..122: note = Description of Artificial Sequence: Synthetic polypeptide
QVQLVESGGGVVQPGRSLRLSCAASGFTFSSYGMHWVRQAPGKGLEWVAVIWYDGSDKYYADSVKGRFTISRDNSKNTLYLQMNSLRAEDTAVYYCARDRLVGATVDAFDIWGQGTMVTVSS

SEQ ID NO: 31883 - DNA, 345 bp, synthetic construct; identical to SEQ ID NO: 29737
  misc_feature 1..345: note = Description of Artificial Sequence: Synthetic polynucleotide
  source 1..345: mol_type = other DNA

SEQ ID NO: 31884 - protein, 115 aa, synthetic construct; identical to SEQ ID NO: 29738
  REGION 1..115: note = Description of Artificial Sequence: Synthetic polypeptide

SEQ ID NO: 31885 - DNA, 345 bp, synthetic construct; identical to SEQ ID NO: 29737
  misc_feature 1..345: note = Description of Artificial Sequence: Synthetic polynucleotide
  source 1..345: mol_type = other DNA

SEQ ID NO: 31886 - protein, 115 aa, synthetic construct; identical to SEQ ID NO: 29738
  REGION 1..115: note = Description of Artificial Sequence: Synthetic polypeptide

SEQ ID NO: 31887 - DNA, 354 bp, synthetic construct; identical to SEQ ID NO: 31559
  misc_feature 1..354: note = Description of Artificial Sequence: Synthetic polynucleotide
  source 1..354: mol_type = other DNA

SEQ ID NO: 31888 - protein, 118 aa, synthetic construct; identical to SEQ ID NO: 31560
  REGION 1..118: note = Description of Artificial Sequence: Synthetic polypeptide

SEQ ID NO: 31889 - DNA, 345 bp, synthetic construct
  misc_feature 1..345: note = Description of Artificial Sequence: Synthetic polynucleotide
  source 1..345: mol_type = other DNA
caggtgcagctacagcagtggggcgcaggactgttgaagccttcggagaccctgtccctcacctgcgctgtctatggtgggtccttcagtggttgctactggagctggatccgccagcccccagggaaggggctggagtggattggggaaatcaatcatagtggaaggaccaactacaacccgtccctcaagagtcgagtcaccatatcagtagacacgtccgagaaccagttctccctgaagctgagctctgtgaccgccgcggacacggctgtgtattactgtgcgagagactacggtgggcttgactactggggccagggaaccctggtcaccgtctcctca

SEQ ID NO: 31890 - protein, 115 aa, synthetic construct; identical to SEQ ID NO: 29790
  REGION 1..115: note = Description of Artificial Sequence: Synthetic polypeptide

SEQ ID NO: 31891 - DNA, 345 bp, synthetic construct; identical to SEQ ID NO: 29737
  misc_feature 1..345: note = Description of Artificial Sequence: Synthetic polynucleotide
  source 1..345: mol_type = other DNA

SEQ ID NO: 31892 - protein, 115 aa, synthetic construct; identical to SEQ ID NO: 29738
  REGION 1..115: note = Description of Artificial Sequence: Synthetic polypeptide

SEQ ID NO: 31893 - DNA, 357 bp, synthetic construct; identical to SEQ ID NO: 28187
  misc_feature 1..357: note = Description of Artificial Sequence: Synthetic polynucleotide
  source 1..357: mol_type = other DNA

SEQ ID NO: 31894 - protein, 119 aa, synthetic construct; identical to SEQ ID NO: 28188
  REGION 1..119: note = Description of Artificial Sequence: Synthetic polypeptide

SEQ ID NO: 31895 - DNA, 345 bp, synthetic construct; identical to SEQ ID NO: 29737
  misc_feature 1..345: note = Description of Artificial Sequence: Synthetic polynucleotide
  source 1..345: mol_type = other DNA

SEQ ID NO: 31896 - protein, 115 aa, synthetic construct; identical to SEQ ID NO: 29738
  REGION 1..115: note = Description of Artificial Sequence: Synthetic polypeptide

SEQ ID NO: 31897 - DNA, 354 bp, synthetic construct; identical to SEQ ID NO: 29879
  misc_feature 1..354: note = Description of Artificial Sequence: Synthetic polynucleotide
  source 1..354: mol_type = other DNA

SEQ ID NO: 31898 - protein, 118 aa, synthetic construct; identical to SEQ ID NO: 29880
  REGION 1..118: note = Description of Artificial Sequence: Synthetic polypeptide

SEQ ID NO: 31899 - DNA, 354 bp, synthetic construct
  misc_feature 1..354: note = Description of Artificial Sequence: Synthetic polynucleotide
  source 1..354: mol_type = other DNA
caggtgcagctggtgcagtctggggctgaggtgaagaagcctggggcctcagtgaaggtctcctgcaaggcttctggatacaccttcaccaattatgatatcaactgggtgcgacaggccactggacaagggcttgagtggatgggatggatgaaccctgacagtggtaacacaggctttgcacagaagttccagggcagagtcaccatgaccaggaacacctccataagcacagcctacatggagctgagcagcctgagatctgaggacacggccgtgtattactgtgcggtttccagtggctggtactggttcgacccctggggccagggaaccctggtcaccgtctcctca

SEQ ID NO: 31900 - protein, 118 aa, synthetic construct
  REGION 1..118: note = Description of Artificial Sequence: Synthetic polypeptide
QVQLVQSGAEVKKPGASVKVSCKASGYTFTNYDINWVRQATGQGLEWMGWMNPDSGNTGFAQKFQGRVTMTRNTSISTAYMELSSLRSEDTAVYYCAVSSGWYWFDPWGQGTLVTVSS

SEQ ID NO: 31901 - DNA, 354 bp, synthetic construct
  misc_feature 1..354: note = Description of Artificial Sequence: Synthetic polynucleotide
  source 1..354: mol_type = other DNA
caggtgcagctggtgcagtctggggctgaggtgaagaagcctggggcctcagtgaaggtctcctgcaaggcttctggatacaccttcaccaattatgatatcaactgggtgcgacaggccactggacaagggcttgagtggatgggatggatgaaccctaacagtggtaacataggctatgcacagaagttccagggcagagtcaccatgaccaggaacacctccataagcacagcctacatggagctgagcagcctgagatctgaggacacggccgtgtattactgtgcgattagcagtggctggtactggttcgacccctggggccagggaaccctggtcaccgtctcctca

SEQ ID NO: 31902 - protein, 118 aa, synthetic construct
  REGION 1..118: note = Description of Artificial Sequence: Synthetic polypeptide
QVQLVQSGAEVKKPGASVKVSCKASGYTFTNYDINWVRQATGQGLEWMGWMNPNSGNIGYAQKFQGRVTMTRNTSISTAYMELSSLRSEDTAVYYCAISSGWYWFDPWGQGTLVTVSS

SEQ ID NO: 31903 - DNA, 345 bp, synthetic construct; identical to SEQ ID NO: 29737
  misc_feature 1..345: note = Description of Artificial Sequence: Synthetic polynucleotide
  source 1..345: mol_type = other DNA

SEQ ID NO: 31904 - protein, 115 aa, synthetic construct; identical to SEQ ID NO: 29738
  REGION 1..115: note = Description of Artificial Sequence: Synthetic polypeptide

SEQ ID NO: 31905 - DNA, 375 bp, synthetic construct; identical to SEQ ID NO: 29783
  misc_feature 1..375: note = Description of Artificial Sequence: Synthetic polynucleotide
  source 1..375: mol_type = other DNA

SEQ ID NO: 31906 - protein, 125 aa, synthetic construct; identical to SEQ ID NO: 29784
  REGION 1..125: note = Description of Artificial Sequence: Synthetic polypeptide

SEQ ID NO: 31907 - DNA, 354 bp, synthetic construct; identical to SEQ ID NO: 31559
  misc_feature 1..354: note = Description of Artificial Sequence: Synthetic polynucleotide
  source 1..354: mol_type = other DNA

SEQ ID NO: 31908 - protein, 118 aa, synthetic construct; identical to SEQ ID NO: 31560
  REGION 1..118: note = Description of Artificial Sequence: Synthetic polypeptide

SEQ ID NO: 31909 - DNA, 354 bp, synthetic construct; identical to SEQ ID NO: 29723
  misc_feature 1..354: note = Description of Artificial Sequence: Synthetic polynucleotide
  source 1..354: mol_type = other DNA

SEQ ID NO: 31910 - protein, 118 aa, synthetic construct; identical to SEQ ID NO: 29724
  REGION 1..118: note = Description of Artificial Sequence: Synthetic polypeptide

SEQ ID NO: 31911 - DNA, 354 bp, synthetic construct
  misc_feature 1..354: note = Description of Artificial Sequence: Synthetic polynucleotide
  source 1..354: mol_type = other DNA
gaggtgcacctggtggagtctgggggaggcttggtaaagcctggggggtcccttagactctcctgtgcagcctctggattcactttcagtaacgcctggatgaactgggtccgccaggctccagggaaggggctggagtgggttggccgtattaaaagcaaaactgatggtgggacaacagactacgctgcacccgtgaaaggcagattcaccatctcaagagatgattcaaaaaacacgctgtatctgcaaatgaacagcctgaaaaccgaggacacagccgtgtattactgtaccacagtgggagctactacggactactggggccagggaaccctggtcaccgtctcctca

SEQ ID NO: 31912 - protein, 118 aa, synthetic construct
  REGION 1..118: note = Description of Artificial Sequence: Synthetic polypeptide
EVHLVESGGGLVKPGGSLRLSCAASGFTFSNAWMNWVRQAPGKGLEWVGRIKSKTDGGTTDYAAPVKGRFTISRDDSKNTLYLQMNSLKTEDTAVYYCTTVGATTDYWGQGTLVTVSS

SEQ ID NO: 31913 - DNA, 357 bp, synthetic construct; identical to SEQ ID NO: 31721
  misc_feature 1..357: note = Description of Artificial Sequence: Synthetic polynucleotide
  source 1..357: mol_type = other DNA

SEQ ID NO: 31914 - protein, 119 aa, synthetic construct; identical to SEQ ID NO: 31722
  REGION 1..119: note = Description of Artificial Sequence: Synthetic polypeptide

SEQ ID NO: 31915 - DNA, 354 bp, synthetic construct
  misc_feature 1..354: note = Description of Artificial Sequence: Synthetic polynucleotide
  source 1..354: mol_type = other DNA
caggtgctcctggtgcagtctggggctgaggtgaagaggcctggggcctcagtgaaggtcagctgcaaggcttctggatacaccttcaccaattatgatattaattgggtgcgacaggccactggacaagggcttgagtggatgggatggatgtaccctaacagtggtagcacaggctatgcacagaaattccagggcagagtcaccatgaccagggacacctccatcagcacagcctacatggagctgagcagcctgagatctgaggacacggccgtctattactgtgcgagtagcagtggctggtactactttgactactggggccagggaaccctggtcaccgtgtcctca

SEQ ID NO: 31916 - protein, 118 aa, synthetic construct
  REGION 1..118: note = Description of Artificial Sequence: Synthetic polypeptide
QVLLVQSGAEVKRPGASVKVSCKASGYTFTNYDINWVRQATGQGLEWMGWMYPNSGSTGYAQKFQGRVTMTRDTSISTAYMELSSLRSEDTAVYYCASSSGWYYFDYWGQGTLVTVSS

SEQ ID NO: 31917 - DNA, 354 bp, synthetic construct
  misc_feature 1..354: note = Description of Artificial Sequence: Synthetic polynucleotide
  source 1..354: mol_type = other DNA
caggtgctcctggtgcagtctggggctgaggtgaagaggcctggggcctcagtgaaggtcagctgcaaggcttctggatacaccttcaccaattatgatattaattgggtgcgacaggccactggacaagggcttgagtggatgggatggatgtaccctaacagtggtaacgcaggctatgcacagaaattccagggcagagtcaccatgaccagggacacctccatcagcacagcctacatggagctgagcagcctgagatctgaggacacggccgtctattactgtgcgagtagcagtggctggtactactttgactactggggccagggaaccctggtcaccgtgtcctca

SEQ ID NO: 31918 - protein, 118 aa, synthetic construct
  REGION 1..118: note = Description of Artificial Sequence: Synthetic polypeptide
QVLLVQSGAEVKRPGASVKVSCKASGYTFTNYDINWVRQATGQGLEWMGWMYPNSGNAGYAQKFQGRVTMTRDTSISTAYMELSSLRSEDTAVYYCASSSGWYYFDYWGQGTLVTVSS

SEQ ID NO: 31919 - DNA, 354 bp, synthetic construct
  misc_feature 1..354: note = Description of Artificial Sequence: Synthetic polynucleotide
  source 1..354: mol_type = other DNA
caggtgctcctggtgcagtctggggctgaggtgaagaggcctggggcctcagtgaaggtcagctgcaaggcttctggatacaccttcaccaattatgatattaattgggtgcgacaggccactggacaagggcttgagtggatgggatggatgtaccctaacagtggtaacgtaggctatgcacagaaattccagggcagagtcaccatgaccagggacacctccatcagcacagcctacatggagctgagcagcctgagatctgaggacacggccgtctattactgtgcgagtagcagtggctggtactactttgactactggggccagggaaccctggtcaccgtgtcctca

SEQ ID NO: 31920 - protein, 118 aa, synthetic construct
  REGION 1..118: note = Description of Artificial Sequence: Synthetic polypeptide
QVLLVQSGAEVKRPGASVKVSCKASGYTFTNYDINWVRQATGQGLEWMGWMYPNSGNVGYAQKFQGRVTMTRDTSISTAYMELSSLRSEDTAVYYCASSSGWYYFDYWGQGTLVTVSS

SEQ ID NO: 31921 - DNA, 354 bp, synthetic construct
  misc_feature 1..354: note = Description of Artificial Sequence: Synthetic polynucleotide
  source 1..354: mol_type = other DNA
caggtgctcctggtgcagtctggggctgaggtgaagaggcctggggcctcagtgaaggtcagctgcaaggcttctggatacaccttcaccaattatgatattaattgggtgcgacaggccactggacaagggcttgagtggatgggatggatgtaccctaacagtggtcaaacaggctatgcacagaaattccagggcagagtcaccatgaccagggacacctccatcagcacagcctacatggagctgagcagcctgagatctgaggacacggccgtctattactgtgcgagtagcagtggctggtactactttgactactggggccagggaaccctggtcaccgtgtcctca

SEQ ID NO: 31922 - protein, 118 aa, synthetic construct
  REGION 1..118: note = Description of Artificial Sequence: Synthetic polypeptide
QVLLVQSGAEVKRPGASVKVSCKASGYTFTNYDINWVRQATGQGLEWMGWMYPNSGQTGYAQKFQGRVTMTRDTSISTAYMELSSLRSEDTAVYYCASSSGWYYFDYWGQGTLVTVSS

SEQ ID NO: 31923 - DNA, 354 bp, synthetic construct
  misc_feature 1..354: note = Description of Artificial Sequence: Synthetic polynucleotide
  source 1..354: mol_type = other DNA
caggtgcaactggtgcagtctggggctgaggtgaagaggcctggggcctcagtgaaggtcagctgcaaggcttctggatacaccttcaccaattatgatattaattgggtgcgacaggccactggacaagggcttgagtggatgggatggatgtaccctaacagtggtagcacaggctatgcacagaaattccagggcagagtcaccatgaccagggacacctccatcagcacagcctacatggagctgagcagcctgagatctgaggacacggccgtctattactgtgcgagtagcagtggctggtactactttgactactggggccagggaaccctggtcaccgtgtcctca

SEQ ID NO: 31924 - protein, 118 aa, synthetic construct
  REGION 1..118: note = Description of Artificial Sequence: Synthetic polypeptide
QVQLVQSGAEVKRPGASVKVSCKASGYTFTNYDINWVRQATGQGLEWMGWMYPNSGSTGYAQKFQGRVTMTRDTSISTAYMELSSLRSEDTAVYYCASSSGWYYFDYWGQGTLVTVSS

SEQ ID NO: 31925 - DNA, 354 bp, synthetic construct
  misc_feature 1..354: note = Description of Artificial Sequence: Synthetic polynucleotide
  source 1..354: mol_type = other DNA
caggtgcaactggtgcagtctggggctgaggtgaagaggcctggggcctcagtgaaggtcagctgcaaggcttctggatacaccttcaccaattatgatattaattgggtgcgacaggccactggacaagggcttgagtggatgggatggatgtaccctaacagtggtaacgcaggctatgcacagaaattccagggcagagtcaccatgaccagggacacctccatcagcacagcctacatggagctgagcagcctgagatctgaggacacggccgtctattactgtgcgagtagcagtggctggtactactttgactactggggccagggaaccctggtcaccgtgtcctca

SEQ ID NO: 31926 - protein, 118 aa, synthetic construct
  REGION 1..118: note = Description of Artificial Sequence: Synthetic polypeptide
QVQLVQSGAEVKRPGASVKVSCKASGYTFTNYDINWVRQATGQGLEWMGWMYPNSGNAGYAQKFQGRVTMTRDTSISTAYMELSSLRSEDTAVYYCASSSGWYYFDYWGQGTLVTVSS

SEQ ID NO: 31927 - DNA, 354 bp, synthetic construct
  misc_feature 1..354: note = Description of Artificial Sequence: Synthetic polynucleotide
  source 1..354: mol_type = other DNA
caggtgcaactggtgcagtctggggctgaggtgaagaggcctggggcctcagtgaaggtcagctgcaaggcttctggatacaccttcaccaattatgatattaattgggtgcgacaggccactggacaagggcttgagtggatgggatggatgtaccctaacagtggtaacgtaggctatgcacagaaattccagggcagagtcaccatgaccagggacacctccatcagcacagcctacatggagctgagcagcctgagatctgaggacacggccgtctattactgtgcgagtagcagtggctggtactactttgactactggggccagggaaccctggtcaccgtgtcctca

SEQ ID NO: 31928 - protein, 118 aa, synthetic construct
  REGION 1..118: note = Description of Artificial Sequence: Synthetic polypeptide
QVQLVQSGAEVKRPGASVKVSCKASGYTFTNYDINWVRQATGQGLEWMGWMYPNSGNVGYAQKFQGRVTMTRDTSISTAYMELSSLRSEDTAVYYCASSSGWYYFDYWGQGTLVTVSS

SEQ ID NO: 31929 - DNA, 354 bp, synthetic construct
  misc_feature 1..354: note = Description of Artificial Sequence: Synthetic polynucleotide
  source 1..354: mol_type = other DNA
caggtgcaactggtgcagtctggggctgaggtgaagaggcctggggcctcagtgaaggtcagctgcaaggcttctggatacaccttcaccaattatgatattaattgggtgcgacaggccactggacaagggcttgagtggatgggatggatgtaccctaacagtggtcaaacaggctatgcacagaaattccagggcagagtcaccatgaccagggacacctccatcagcacagcctacatggagctgagcagcctgagatctgaggacacggccgtctattactgtgcgagtagcagtggctggtactactttgactactggggccagggaaccctggtcaccgtgtcctca

SEQ ID NO: 31930 - protein, 118 aa, synthetic construct
  REGION 1..118: note = Description of Artificial Sequence: Synthetic polypeptide
QVQLVQSGAEVKRPGASVKVSCKASGYTFTNYDINWVRQATGQGLEWMGWMYPNSGQTGYAQKFQGRVTMTRDTSISTAYMELSSLRSEDTAVYYCASSSGWYYFDYWGQGTLVTVSS

SEQ ID NO: 31931 - DNA, 354 bp, synthetic construct; identical to SEQ ID NO: 31915
  misc_feature 1..354: note = Description of Artificial Sequence: Synthetic polynucleotide
  source 1..354: mol_type = other DNA

SEQ ID NO: 31932 - protein, 118 aa, synthetic construct; identical to SEQ ID NO: 31916
  REGION 1..118: note = Description of Artificial Sequence: Synthetic polypeptide

SEQ ID NO: 31933 - DNA, 354 bp, synthetic construct
  misc_feature 1..354: note = Description of Artificial Sequence: Synthetic polynucleotide
  source 1..354: mol_type = other DNA
caggtgcaactggtgcagtctggggctgaggtgaagaggcctggggcctcagtgaaggtcagctgcaaggcttctggatacaccttcaccaattatgatattaattgggtgcgacaggcccctggacaagggcttgagtggatgggatggatgtaccctaacagtggtagcacaggctatgcacagaaattccagggcagagtcaccatgaccagggacacctccatcagcacagcctacatggagctgagcagcctgagatctgaggacacggccgtctattactgtgcgagtagcagtggctggtactactttgactactggggccagggaaccctggtcaccgtgtcctca

SEQ ID NO: 31934 - protein, 118 aa, synthetic construct
  REGION 1..118: note = Description of Artificial Sequence: Synthetic polypeptide
QVQLVQSGAEVKRPGASVKVSCKASGYTFTNYDINWVRQAPGQGLEWMGWMYPNSGSTGYAQKFQGRVTMTRDTSISTAYMELSSLRSEDTAVYYCASSSGWYYFDYWGQGTLVTVSS

SEQ ID NO: 31935 - DNA, 354 bp, synthetic construct
  misc_feature 1..354: note = Description of Artificial Sequence: Synthetic polynucleotide
  source 1..354: mol_type = other DNA
caggtgctcctggtgcagtctggggctgaggtgaagaggcctggggcctcagtgaaggtcagctgcaaggcttctggatacaccttcaccaattatgatattaattgggtgcgacaggcccctggacaagggcttgagtggatgggatggatgtaccctaacagtggtcaaacaggctatgcacagaaattccagggcagagtcaccatgaccagggacacctccatcagcacagcctacatggagctgagcagcctgagatctgaggacacggccgtctattactgtgcgagtagcagtggctggtactactttgactactggggccagggaaccctggtcaccgtgtcctca

SEQ ID NO: 31936 - protein, 118 aa, synthetic construct
  REGION 1..118: note = Description of Artificial Sequence: Synthetic polypeptide
QVLLVQSGAEVKRPGASVKVSCKASGYTFTNYDINWVRQAPGQGLEWMGWMYPNSGQTGYAQKFQGRVTMTRDTSISTAYMELSSLRSEDTAVYYCASSSGWYYFDYWGQGTLVTVSS

SEQ ID NO: 31937 - DNA, 354 bp, synthetic construct; identical to SEQ ID NO: 31925
  misc_feature 1..354: note = Description of Artificial Sequence: Synthetic polynucleotide
  source 1..354: mol_type = other DNA

SEQ ID NO: 31938 - protein, 118 aa, synthetic construct; identical to SEQ ID NO: 31926
  REGION 1..118: note = Description of Artificial Sequence: Synthetic polypeptide

SEQ ID NO: 31939 - DNA, 354 bp, synthetic construct
  misc_feature 1..354: note = Description of Artificial Sequence: Synthetic polynucleotide
  source 1..354: mol_type = other DNA
caggtgcagctggtgcagtctgggactgaggtgaagaagcctggggcctcagtgaaggtgtcctgcaaggcttctggatacaccttcaccaattatgatatcaactgggtgcgacaggccactggacaagggcttgagtggatgggatggatgcaccctaacagtggtaacacaggctatgcacagaagttccagggcagagtcaccttgaccagggacacctccatcagcacagcctacatggaactgagcagcctgagatctgaggacacggccgtgtattactgtgcgagtagcagtggctggtactactttgactactggggccagggaaccctggtcaccgtgtcctca

SEQ ID NO: 31940 - protein, 118 aa, synthetic construct; identical to SEQ ID NO: 29172
  REGION 1..118: note = Description of Artificial Sequence: Synthetic polypeptide

SEQ ID NO: 31941 - DNA, 354 bp, synthetic construct; identical to SEQ ID NO: 31939
  misc_feature 1..354: note = Description of Artificial Sequence: Synthetic polynucleotide
  source 1..354: mol_type = other DNA

SEQ ID NO: 31942 - protein, 118 aa, synthetic construct; identical to SEQ ID NO: 29172
  REGION 1..118: note = Description of Artificial Sequence: Synthetic polypeptide

SEQ ID NO: 31943 - DNA, 354 bp, synthetic construct; identical to SEQ ID NO: 31939
  misc_feature 1..354: note = Description of Artificial Sequence: Synthetic polynucleotide
  source 1..354: mol_type = other DNA

SEQ ID NO: 31944 - protein, 118 aa, synthetic construct; identical to SEQ ID NO: 29172
  REGION 1..118: note = Description of Artificial Sequence: Synthetic polypeptide

SEQ ID NO: 31945 - DNA, 354 bp, synthetic construct
  misc_feature 1..354: note = Description of Artificial Sequence: Synthetic polynucleotide
  source 1..354: mol_type = other DNA
caggtgcagctggtgcagtctgggactgaggtgaagaagcctggggcctcagtgaaggtgtcctgcaaggcttctggatacaccttcaccaattatgatatcaactgggtgcgacaggccactggacaagggcttgagtggatgggatggatgcaccctaacagtggtaacgcaggctatgcacagaagttccagggcagagtcaccttgaccagggacacctccatcagcacagcctacatggaactgagcagcctgagatctgaggacacggccgtgtattactgtgcgagtagcagtggctggtactactttgactactggggccagggaaccctggtcaccgtgtcctca

SEQ ID NO: 31946 - protein, 118 aa, synthetic construct
  REGION 1..118: note = Description of Artificial Sequence: Synthetic polypeptide
QVQLVQSGTEVKKPGASVKVSCKASGYTFTNYDINWVRQATGQGLEWMGWMHPNSGNAGYAQKFQGRVTLTRDTSISTAYMELSSLRSEDTAVYYCASSSGWYYFDYWGQGTLVTVSS

SEQ ID NO: 31947 - DNA, 354 bp, synthetic construct
  misc_feature 1..354: note = Description of Artificial Sequence: Synthetic polynucleotide
  source 1..354: mol_type = other DNA
caggtgcagctggtgcagtctgggactgaggtgaagaagcctggggcctcagtgaaggtgtcctgcaaggcttctggatacaccttcaccaattatgatatcaactgggtgcgacaggccactggacaagggcttgagtggatgggatggatgcaccctaacagtggtagcacaggctatgcacagaagttccagggcagagtcaccttgaccagggacacctccatcagcacagcctacatggaactgagcagcctgagatctgaggacacggccgtgtattactgtgcgagtagcagtggctggtactactttgactactggggccagggaaccctggtcaccgtgtcctca

SEQ ID NO: 31948 - protein, 118 aa, synthetic construct
  REGION 1..118: note = Description of Artificial Sequence: Synthetic polypeptide
QVQLVQSGTEVKKPGASVKVSCKASGYTFTNYDINWVRQATGQGLEWMGWMHPNSGSTGYAQKFQGRVTLTRDTSISTAYMELSSLRSEDTAVYYCASSSGWYYFDYWGQGTLVTVSS

SEQ ID NO: 31949 - DNA, 354 bp, synthetic construct
  misc_feature 1..354: note = Description of Artificial Sequence: Synthetic polynucleotide
  source 1..354: mol_type = other DNA
caggtgcagctggtgcagtctgggactgaggtgaagaagcctggggcctcagtgaaggtgtcctgcaaggcttctggatacaccttcaccaattatgatatcaactgggtgcgacaggccactggacaagggcttgagtggatgggatggatgcaccctaacagtggtcaaacaggctatgcacagaagttccagggcagagtcaccttgaccagggacacctccatcagcacagcctacatggaactgagcagcctgagatctgaggacacggccgtgtattactgtgcgagtagcagtggctggtactactttgactactggggccagggaaccctggtcaccgtgtcctca

SEQ ID NO: 31950 - protein, 118 aa, synthetic construct
  REGION 1..118: note = Description of Artificial Sequence: Synthetic polypeptide
QVQLVQSGTEVKKPGASVKVSCKASGYTFTNYDINWVRQATGQGLEWMGWMHPNSGQTGYAQKFQGRVTLTRDTSISTAYMELSSLRSEDTAVYYCASSSGWYYFDYWGQGTLVTVSS

SEQ ID NO: 31951 - DNA, 354 bp, synthetic construct; identical to SEQ ID NO: 31949
  misc_feature 1..354: note = Description of Artificial Sequence: Synthetic polynucleotide
  source 1..354: mol_type = other DNA

SEQ ID NO: 31952 - protein, 118 aa, synthetic construct; identical to SEQ ID NO: 31950
  REGION 1..118: note = Description of Artificial Sequence: Synthetic polypeptide

SEQ ID NO: 31953 - DNA, 354 bp, synthetic construct; identical to SEQ ID NO: 31945
  misc_feature 1..354: note = Description of Artificial Sequence: Synthetic polynucleotide
  source 1..354: mol_type = other DNA

SEQ ID NO: 31954 - protein, 118 aa, synthetic construct; identical to SEQ ID NO: 31946
  REGION 1..118: note = Description of Artificial Sequence: Synthetic polypeptide

SEQ ID NO: 31955 - DNA, 354 bp, synthetic construct; identical to SEQ ID NO: 31949
  misc_feature 1..354: note = Description of Artificial Sequence: Synthetic polynucleotide
  source 1..354: mol_type = other DNA

SEQ ID NO: 31956 - protein, 118 aa, synthetic construct; identical to SEQ ID NO: 31950
  REGION 1..118: note = Description of Artificial Sequence: Synthetic polypeptide

SEQ ID NO: 31957 - DNA, 354 bp, synthetic construct; identical to SEQ ID NO: 31945
  misc_feature 1..354: note = Description of Artificial Sequence: Synthetic polynucleotide
  source 1..354: mol_type = other DNA

SEQ ID NO: 31958 - protein, 118 aa, synthetic construct; identical to SEQ ID NO: 31946
  REGION 1..118: note = Description of Artificial Sequence: Synthetic polypeptide

SEQ ID NO: 31959 - DNA, 354 bp, synthetic construct; identical to SEQ ID NO: 31949
  misc_feature 1..354: note = Description of Artificial Sequence: Synthetic polynucleotide
  source 1..354: mol_type = other DNA

SEQ ID NO: 31960 - protein, 118 aa, synthetic construct; identical to SEQ ID NO: 31950
  REGION 1..118: note = Description of Artificial Sequence: Synthetic polypeptide

SEQ ID NO: 31961 - DNA, 354 bp, synthetic construct; identical to SEQ ID NO: 31947
  misc_feature 1..354: note = Description of Artificial Sequence: Synthetic polynucleotide
  source 1..354: mol_type = other DNA

SEQ ID NO: 31962 - protein, 118 aa, synthetic construct; identical to SEQ ID NO: 31948
  REGION 1..118: note = Description of Artificial Sequence: Synthetic polypeptide

SEQ ID NO: 31963 - DNA, 354 bp, synthetic construct
  misc_feature 1..354: note = Description of Artificial Sequence: Synthetic polynucleotide
  source 1..354: mol_type = other DNA
caggtgcagctggtgcagtctggggctgaggtgaagaagcctggggcctcagtgaaggtgtcctgcaaggcttctggatacaccttcaccaattatgatatcaactgggtgcgacaggccactggacaagggcttgagtggatgggatggatgcaccctaacagtggtaacacaggctatgcacagaagttccagggcagagtcaccttgaccagggacacctccatcagcacagcctacatggaactgagcagcctgagatctgaggacacggccgtgtattactgtgcgagtagcagtggctggtactactttgactactggggccagggaaccctggtcaccgtgtcctca

SEQ ID NO: 31964 - protein, 118 aa, synthetic construct
  REGION 1..118: note = Description of Artificial Sequence: Synthetic polypeptide
QVQLVQSGAEVKKPGASVKVSCKASGYTFTNYDINWVRQATGQGLEWMGWMHPNSGNTGYAQKFQGRVTLTRDTSISTAYMELSSLRSEDTAVYYCASSSGWYYFDYWGQGTLVTVSS

SEQ ID NO: 31965 - DNA, 354 bp, synthetic construct
  misc_feature 1..354: note = Description of Artificial Sequence: Synthetic polynucleotide
  source 1..354: mol_type = other DNA
caggtgcagctggtgcagtctggggctgaggtgaagaagcctggggcctcagtgaaggtgtcctgcaaggcttctggatacaccttcaccaattatgatatcaactgggtgcgacaggcccctggacaagggcttgagtggatgggatggatgcaccctaacagtggtaacacaggctatgcacagaagttccagggcagagtcaccttgaccagggacacctccatcagcacagcctacatggaactgagcagcctgagatctgaggacacggccgtgtattactgtgcgagtagcagtggctggtactactttgactactggggccagggaaccctggtcaccgtgtcctca

SEQ ID NO: 31966 - protein, 118 aa, synthetic construct
  REGION 1..118: note = Description of Artificial Sequence: Synthetic polypeptide
QVQLVQSGAEVKKPGASVKVSCKASGYTFTNYDINWVRQAPGQGLEWMGWMHPNSGNTGYAQKFQGRVTLTRDTSISTAYMELSSLRSEDTAVYYCASSSGWYYFDYWGQGTLVTVSS

SEQ ID NO: 31967 - DNA, 354 bp, synthetic construct
  misc_feature 1..354: note = Description of Artificial Sequence: Synthetic polynucleotide
  source 1..354: mol_type = other DNA
caggtgcagctggtgcagtctggggctgaggtgaagaagcctggggcctcagtgaaggtgtcctgcaaggcttctggatacaccttcaccaattatgatatcaactgggtgcgacaggccactggacaagggcttgagtggatgggatggatgcaccctaacagtggtcaaacaggctatgcacagaagttccagggcagagtcaccttgaccagggacacctccatcagcacagcctacatggaactgagcagcctgagatctgaggacacggccgtgtattactgtgcgagtagcagtggctggtactactttgactactggggccagggaaccctggtcaccgtgtcctca

SEQ ID NO: 31968 - protein, 118 aa, synthetic construct
  REGION 1..118: note = Description of Artificial Sequence: Synthetic polypeptide
QVQLVQSGAEVKKPGASVKVSCKASGYTFTNYDINWVRQATGQGLEWMGWMHPNSGQTGYAQKFQGRVTLTRDTSISTAYMELSSLRSEDTAVYYCASSSGWYYFDYWGQGTLVTVSS

SEQ ID NO: 31969 - DNA, 354 bp, synthetic construct
  misc_feature 1..354: note = Description of Artificial Sequence: Synthetic polynucleotide
  source 1..354: mol_type = other DNA
caggtgcagctggtgcagtctggggctgaggtgaagaagcctggggcctcagtgaaggtgtcctgcaaggcttctggatacaccttcaccaattatgatatcaactgggtgcgacaggcccctggacaagggcttgagtggatgggatggatgcaccctaacagtggtcaaacaggctatgcacagaagttccagggcagagtcaccttgaccagggacacctccatcagcacagcctacatggaactgagcagcctgagatctgaggacacggccgtgtattactgtgcgagtagcagtggctggtactactttgactactggggccagggaaccctggtcaccgtgtcctca

SEQ ID NO: 31970 - protein, 118 aa, synthetic construct
  REGION 1..118: note = Description of Artificial Sequence: Synthetic polypeptide
QVQLVQSGAEVKKPGASVKVSCKASGYTFTNYDINWVRQAPGQGLEWMGWMHPNSGQTGYAQKFQGRVTLTRDTSISTAYMELSSLRSEDTAVYYCASSSGWYYFDYWGQGTLVTVSS

SEQ ID NO: 31971 - DNA, 354 bp, synthetic construct
  misc_feature 1..354: note = Description of Artificial Sequence: Synthetic polynucleotide
  source 1..354: mol_type = other DNA
caggtgcagctggtgcagtctggggctgaggtgaagaagcctggggcctcagtgaaggtgtcctgcaaggcttctggatacaccttcaccaattatgatatcaactgggtgcgacaggcccctggacaagggcttgagtggatgggatggatgcaccctaacagtggtagcacaggctatgcacagaagttccagggcagagtcaccttgaccagggacacctccatcagcacagcctacatggaactgagcagcctgagatctgaggacacggccgtgtattactgtgcgagtagcagtggctggtactactttgactactggggccagggaaccctggtcaccgtgtcctca

SEQ ID NO: 31972 - protein, 118 aa, synthetic construct
  REGION 1..118: note = Description of Artificial Sequence: Synthetic polypeptide
QVQLVQSGAEVKKPGASVKVSCKASGYTFTNYDINWVRQAPGQGLEWMGWMHPNSGSTGYAQKFQGRVTLTRDTSISTAYMELSSLRSEDTAVYYCASSSGWYYFDYWGQGTLVTVSS

SEQ ID NO: 31973 - DNA, 354 bp, synthetic construct
  misc_feature 1..354: note = Description of Artificial Sequence: Synthetic polynucleotide
  source 1..354: mol_type = other DNA
caggtgcagctggtgcagtctgggggtgaggtgaagaagcctggggcctcagtgaaggtgtcctgcaaggcttctggatacaccttcaccaattatgatatcaactgggtgcgacaggccgaaggacaagggcttgagtggatgggatggatgcaccctaacagtggtaacgaaggctatgcacagaagttccagggcagagtcaccttgaccagggacacctccatcagcacagcctacatggaactgagcagcctgagatctgaggacacggccgtgtattactgtgcgagtagcagtggctggtactactttgactactggggccagggaaccctggtcaccgtgtcctca

SEQ ID NO: 31974 - protein, 118 aa, synthetic construct
  REGION 1..118: note = Description of Artificial Sequence: Synthetic polypeptide
QVQLVQSGGEVKKPGASVKVSCKASGYTFTNYDINWVRQAEGQGLEWMGWMHPNSGNEGYAQKFQGRVTLTRDTSISTAYMELSSLRSEDTAVYYCASSSGWYYFDYWGQGTLVTVSS

SEQ ID NO: 31975 - DNA, 351 bp, synthetic construct
  misc_feature 1..351: note = Description of Artificial Sequence: Synthetic polynucleotide
  source 1..351: mol_type = other DNA
caggtgcagctggtacagtctggggctgaggtgaagaagcctggggcctcagtgaaggtcagctgcaaggcttctggatacaccttcaccgactactatttgcactgggtgcgacaggcccctggacaaggtcttgagtggatgggatggatccaccctaacagtggtggcacaaactatgcacagaagtttcagggcagggtcaccatgaccagggacacgtccatcagcacagcctacatggagctgagcagtctgagatctgacgacacggccgtgtattactgtgcgagagatggtaccagctcgtttgactactggggccagggaaccctggtcaccgtgtcctca

SEQ ID NO: 31976 - protein, 117 aa, synthetic construct
  REGION 1..117: note = Description of Artificial Sequence: Synthetic polypeptide
QVQLVQSGAEVKKPGASVKVSCKASGYTFTDYYLHWVRQAPGQGLEWMGWIHPNSGGTNYAQKFQGRVTMTRDTSISTAYMELSSLRSDDTAVYYCARDGTSSFDYWGQGTLVTVSS

SEQ ID NO: 31977 - DNA, 351 bp, synthetic construct; identical to SEQ ID NO: 31975
  misc_feature 1..351: note = Description of Artificial Sequence: Synthetic polynucleotide
  source 1..351: mol_type = other DNA

SEQ ID NO: 31978 - protein, 117 aa, synthetic construct; identical to SEQ ID NO: 31976
  REGION 1..117: note = Description of Artificial Sequence: Synthetic polypeptide

SEQ ID NO: 31979 - DNA, 351 bp, synthetic construct; identical to SEQ ID NO: 31975
  misc_feature 1..351: note = Description of Artificial Sequence: Synthetic polynucleotide
  source 1..351: mol_type = other DNA

SEQ ID NO: 31980 - protein, 117 aa, synthetic construct; identical to SEQ ID NO: 31976
  REGION 1..117: note = Description of Artificial Sequence: Synthetic polypeptide

SEQ ID NO: 31981 - DNA, 351 bp, synthetic construct
  misc_feature 1..351: note = Description of Artificial Sequence: Synthetic polynucleotide
  source 1..351: mol_type = other DNA
caggtgcagctggtacagtctggggctgaggtgaagaagcctggggcctcagtgaaggtcagctgcaaggcttctggatacaccttcaccgactactatttgcactgggtgcgacaggcccctggacaaggtcttgagtggatgggatggatccaccctaacagtggtggcacaaactatgcacagaagtttcagggcagggtcaccatgaccagggacacgtccatcagcacagcctacatggagctgagcagtctgagatctgacgacacggccgtgtattactgtgcgagagatgctaccagctcgtttgactactggggccagggaaccctggtcaccgtgtcctca

SEQ ID NO: 31982 - protein, 117 aa, synthetic construct
  REGION 1..117: note = Description of Artificial Sequence: Synthetic polypeptide
QVQLVQSGAEVKKPGASVKVSCKASGYTFTDYYLHWVRQAPGQGLEWMGWIHPNSGGTNYAQKFQGRVTMTRDTSISTAYMELSSLRSDDTAVYYCARDATSSFDYWGQGTLVTVSS

SEQ ID NO: 31983 - DNA, 351 bp, synthetic construct
  misc_feature 1..351: note = Description of Artificial Sequence: Synthetic polynucleotide
  source 1..351: mol_type = other DNA
caggtgcagctggtacagtctggggctgaggtgaagaagcctggggcctcagtgaaggtcagctgcaaggcttctggatacaccttcaccgactactatttgcactgggtgcgacaggcccctggacaaggtcttgagtggatgggatggatccaccctaacagtggtggcacaaactatgcacagaagtttcagggcagggtcaccatgaccagggacacgtccatcagcacagcctacatggagctgagcagtctgagatctgacgacacggccgtgtattactgtgcgagaagtggtaccagctcgtttgactactggggccagggaaccctggtcaccgtgtcctca

SEQ ID NO: 31984 - protein, 117 aa, synthetic construct
  REGION 1..117: note = Description of Artificial Sequence: Synthetic polypeptide
QVQLVQSGAEVKKPGASVKVSCKASGYTFTDYYLHWVRQAPGQGLEWMGWIHPNSGGTNYAQKFQGRVTMTRDTSISTAYMELSSLRSDDTAVYYCARSGTSSFDYWGQGTLVTVSS

SEQ ID NO: 31985 - DNA, 351 bp, synthetic construct; identical to SEQ ID NO: 31983
  misc_feature 1..351: note = Description of Artificial Sequence: Synthetic polynucleotide
  source 1..351: mol_type = other DNA

SEQ ID NO: 31986 - protein, 117 aa, synthetic construct; identical to SEQ ID NO: 31984
  REGION 1..117: note = Description of Artificial Sequence: Synthetic polypeptide

SEQ ID NO: 31987 - DNA, 351 bp, synthetic construct; identical to SEQ ID NO: 31981
  misc_feature 1..351: note = Description of Artificial Sequence: Synthetic polynucleotide
  source 1..351: mol_type = other DNA

SEQ ID NO: 31988 - protein, 117 aa, synthetic construct; identical to SEQ ID NO: 31982
  REGION 1..117: note = Description of Artificial Sequence: Synthetic polypeptide

SEQ ID NO: 31989 - DNA, 351 bp, synthetic construct; identical to SEQ ID NO: 31981
  misc_feature 1..351: note = Description of Artificial Sequence: Synthetic polynucleotide
  source 1..351: mol_type = other DNA

SEQ ID NO: 31990 - protein, 117 aa, synthetic construct; identical to SEQ ID NO: 31982
  REGION 1..117: note = Description of Artificial Sequence: Synthetic polypeptide

SEQ ID NO: 31991 - DNA, 369 bp, synthetic construct
  misc_feature 1..369: note = Description of Artificial Sequence: Synthetic polynucleotide
  source 1..369: mol_type = other DNA
caggtgcagctggtggagtctgggggaggcgtggtccagcctgggaggtccctgagactctcctgtgcagcgtctggattcaccttcagtaactatgtcatgcactgggtccgccaggctccaggcaaggggctggagtgggtggcagttatctggtatgatgcaagtaataaatactatgcagactccgtgaagggccgattcaccatctccagagacaattccaagaacacgctgtatctgcaaatgaacagcctgagagccgaggacacggctgtgtattactgtacgagagaggtatatagcagtggctggtacgactacggtatggacgtctggggccaagggaccacggtcaccgtgtcctca

SEQ ID NO: 31992 - protein, 123 aa, synthetic construct
  REGION 1..123: note = Description of Artificial Sequence: Synthetic polypeptide
QVQLVESGGGVVQPGRSLRLSCAASGFTFSNYVMHWVRQAPGKGLEWVAVIWYDASNKYYADSVKGRFTISRDNSKNTLYLQMNSLRAEDTAVYYCTREVYSSGWYDYGMDVWGQGTTVTVSS

SEQ ID NO: 31993 - DNA, 369 bp, synthetic construct
  misc_feature 1..369: note = Description of Artificial Sequence: Synthetic polynucleotide
  source 1..369: mol_type = other DNA
caggtgcagctggtggagtctgggggaggcgtggtccagcctgggaggtccctgagactctcctgtgcagcgtctggattcaccttcagtaactatgtcatgcactgggtccgccaggctccaggcaaggggctggagtgggtggcagttatctggtatgatggaagtaataaatactatgcagaatccgtgaagggccgattcaccatctccagagacaattccaagaacacgctgtatctgcaaatgaacagcctgagagccgaggacacggctgtgtattactgtacgagagaggtatatagcagtggctggtacgactacggtatggacgtctggggccaagggaccacggtcaccgtgtcctca

SEQ ID NO: 31994 - protein, 123 aa, synthetic construct
  REGION 1..123: note = Description of Artificial Sequence: Synthetic polypeptide
QVQLVESGGGVVQPGRSLRLSCAASGFTFSNYVMHWVRQAPGKGLEWVAVIWYDGSNKYYAESVKGRFTISRDNSKNTLYLQMNSLRAEDTAVYYCTREVYSSGWYDYGMDVWGQGTTVTVSS

SEQ ID NO: 31995 - DNA, 369 bp, synthetic construct
  misc_feature 1..369: note = Description of Artificial Sequence: Synthetic polynucleotide
  source 1..369: mol_type = other DNA
caggtgcagctggtggagtctgggggaggcgtggtccagcctgggaggtccctgagactctcctgtgcagcgtctggattcaccttcagtaactatgtcatgcactgggtccgccaggctccaggcaaggggctggagtgggtggcagttatctggtatgatggaagtaataaatactatgcaggctccgtgaagggccgattcaccatctccagagacaattccaagaacacgctgtatctgcaaatgaacagcctgagagccgaggacacggctgtgtattactgtacgagagaggtatatagcagtggctggtacgactacggtatggacgtctggggccaagggaccacggtcaccgtgtcctca

SEQ ID NO: 31996 - protein, 123 aa, synthetic construct
  REGION 1..123: note = Description of Artificial Sequence: Synthetic polypeptide
QVQLVESGGGVVQPGRSLRLSCAASGFTFSNYVMHWVRQAPGKGLEWVAVIWYDGSNKYYAGSVKGRFTISRDNSKNTLYLQMNSLRAEDTAVYYCTREVYSSGWYDYGMDVWGQGTTVTVSS

SEQ ID NO: 31997 - DNA, 369 bp, synthetic construct
  misc_feature 1..369: note = Description of Artificial Sequence: Synthetic polynucleotide
  source 1..369: mol_type = other DNA
caggtgcagctggtggagtctgggggaggcgtggtccagcctgggaggtccctgagactctcctgtgcagcgtctggattcaccttcagtaactatgtcatgcactgggtccgccaggctccaggcaaggggctggagtgggtggcagttatctggtatgatggaagtaataaatactatgcagacgccgtgaagggccgattcaccatctccagagacaattccaagaacacgctgtatctgcaaatgaacagcctgagagccgaggacacggctgtgtattactgtacgagagaggtatatagcagtggctggtacgactacggtatggacgtctggggccaagggaccacggtcaccgtgtcctca

SEQ ID NO: 31998 - protein, 123 aa, synthetic construct
  REGION 1..123: note = Description of Artificial Sequence: Synthetic polypeptide
QVQLVESGGGVVQPGRSLRLSCAASGFTFSNYVMHWVRQAPGKGLEWVAVIWYDGSNKYYADAVKGRFTISRDNSKNTLYLQMNSLRAEDTAVYYCTREVYSSGWYDYGMDVWGQGTTVTVSS

SEQ ID NO: 31999 - DNA, 369 bp, synthetic construct
  misc_feature 1..369: note = Description of Artificial Sequence: Synthetic polynucleotide
  source 1..369: mol_type = other DNA
caggtgcagctggtggagtctgggggaggcgtggtccagcctgggaggtccctgagactctcctgtgcagcgtctggattcaccttcagtaactatgtcatgcactgggtccgccaggctccaggcaaggggctggagtgggtggcagttatctggtatgatgcaagtaataaatactatgcagaatccgtgaagggccgattcaccatctccagagacaattccaagaacacgctgtatctgcaaatgaacagcctgagagccgaggacacggctgtgtattactgtacgagagaggtatatagcagtggctggtacgactacggtatggacgtctggggccaagggaccacggtcaccgtgtcctca

SEQ ID NO: 32000 - protein, 123 aa, synthetic construct
  REGION 1..123: note = Description of Artificial Sequence: Synthetic polypeptide
QVQLVESGGGVVQPGRSLRLSCAASGFTFSNYVMHWVRQAPGKGLEWVAVIWYDASNKYYAESVKGRFTISRDNSKNTLYLQMNSLRAEDTAVYYCTREVYSSGWYDYGMDVWGQGTTVTVSS

SEQ ID NO: 32001 - DNA, 369 bp, synthetic construct
  misc_feature 1..369: note = Description of Artificial Sequence: Synthetic polynucleotide
  source 1..369: mol_type = other DNA
caggtgcagctggtggagtctgggggaggcgtggtccagcctgggaggtccctgagactctcctgtgcagcgtctggattcaccttcagtaactatgtcatgcactgggtccgccaggctccaggcaaggggctggagtgggtggcagttatctggtatgatgcaagtaataaatactatgcagacgccgtgaagggccgattcaccatctccagagacaattccaagaacacgctgtatctgcaaatgaacagcctgagagccgaggacacggctgtgtattactgtacgagagaggtatatagcagtggctggtacgactacggtatggacgtctggggccaagggaccacggtcaccgtgtcctca

SEQ ID NO: 32002 - protein, 123 aa, synthetic construct
  REGION 1..123: note = Description of Artificial Sequence: Synthetic polypeptide
QVQLVESGGGVVQPGRSLRLSCAASGFTFSNYVMHWVRQAPGKGLEWVAVIWYDASNKYYADAVKGRFTISRDNSKNTLYLQMNSLRAEDTAVYYCTREVYSSGWYDYGMDVWGQGTTVTVSS

SEQ ID NO: 32003 - DNA, 369 bp, synthetic construct
  misc_feature 1..369: note = Description of Artificial Sequence: Synthetic polynucleotide
  source 1..369: mol_type = other DNA
caggtgcagctggtggagtctgggggaggcgtggtccagcctgggaggtccctgagactctcctgtgcagcgtctggattcaccttcagtaactatgtcatgcactgggtccgccaggctccaggcaaggggctggagtgggtggcagttatctggtatgatgcaagtaataaatactatgcagactccgtgaagggccgattcaccatctccagagacaattccaagaacacgctgtatctgcaaatgaacagcctgagagccgaggacacggctgtgtattactgtacgagagaggtatatagcagtggctattacgactacggtatggacgtctggggccaagggaccacggtcaccgtgtcctca

SEQ ID NO: 32004 - protein, 123 aa, synthetic construct
  REGION 1..123: note = Description of Artificial Sequence: Synthetic polypeptide
QVQLVESGGGVVQPGRSLRLSCAASGFTFSNYVMHWVRQAPGKGLEWVAVIWYDASNKYYADSVKGRFTISRDNSKNTLYLQMNSLRAEDTAVYYCTREVYSSGYYDYGMDVWGQGTTVTVSS

SEQ ID NO: 32005 - DNA, 369 bp, synthetic construct
  misc_feature 1..369: note = Description of Artificial Sequence: Synthetic polynucleotide
  source 1..369: mol_type = other DNA
caggtgcagctggtggagtctgggggaggcgtggtccagcctgggaggtccctgagactctcctgtgcagcgtctggattcaccttcagtaactatgtcatgcactgggtccgccaggctccaggcaaggggctggagtgggtggcagttatctggtatgatgcaagtaataaatactatgcagactccgtgaagggccgattcaccatctccagagacaattccaagaacacgctgtatctgcaaatgaacagcctgagagccgaggacacggctgtgtattactgtacgagagaggtatatagcagtggcttctacgactacggtatggacgtctggggccaagggaccacggtcaccgtgtcctca

SEQ ID NO: 32006 - protein, 123 aa, synthetic construct
  REGION 1..123: note = Description of Artificial Sequence: Synthetic polypeptide
QVQLVESGGGVVQPGRSLRLSCAASGFTFSNYVMHWVRQAPGKGLEWVAVIWYDASNKYYADSVKGRFTISRDNSKNTLYLQMNSLRAEDTAVYYCTREVYSSGFYDYGMDVWGQGTTVTVSS

SEQ ID NO: 32007 - DNA, 369 bp, synthetic construct
  misc_feature 1..369: note = Description of Artificial Sequence: Synthetic polynucleotide
  source 1..369: mol_type = other DNA
caggtgcagctggtggagtctgggggaggcgtggtccagcctgggaggtccctgagactctcctgtgcagcgtctggattcaccttcagtaactatgtcatgcactgggtccgccaggctccaggcaaggggctggagtgggtggcagttatctggtatgatggaagtaataaatactatgcagaatccgtgaagggccgattcaccatctccagagacaattccaagaacacgctgtatctgcaaatgaacagcctgagagccgaggacacggctgtgtattactgtacgagagaggtatatagcagtggctattacgactacggtatggacgtctggggccaagggaccacggtcaccgtgtcctca

SEQ ID NO: 32008 - protein, 123 aa, synthetic construct
  REGION 1..123: note = Description of Artificial Sequence: Synthetic polypeptide
QVQLVESGGGVVQPGRSLRLSCAASGFTFSNYVMHWVRQAPGKGLEWVAVIWYDGSNKYYAESVKGRFTISRDNSKNTLYLQMNSLRAEDTAVYYCTREVYSSGYYDYGMDVWGQGTTVTVSS

SEQ ID NO: 32009 - DNA, 369 bp, synthetic construct
  misc_feature 1..369: note = Description of Artificial Sequence: Synthetic polynucleotide
  source 1..369: mol_type = other DNA
caggtgcagctggtggagtctgggggaggcgtggtccagcctgggaggtccctgagactctcctgtgcagcgtctggattcaccttcagtaactatgtcatgcactgggtccgccaggctccaggcaaggggctggagtgggtggcagttatctggtatgatggaagtaataaatactatgcagactccgtgaagggccgattcaccatctccagagacaattccaagaacacgctgtatctgcaaatgaacagcctgagagccgaggacacggctgtgtattactgtacgagagaggtatatagcagtggctattacgactacggtatggacgtctggggccaagggaccacggtcaccgtgtcctca

SEQ ID NO: 32010 - protein, 123 aa, synthetic construct
  REGION 1..123: note = Description of Artificial Sequence: Synthetic polypeptide
QVQLVESGGGVVQPGRSLRLSCAASGFTFSNYVMHWVRQAPGKGLEWVAVIWYDGSNKYYADSVKGRFTISRDNSKNTLYLQMNSLRAEDTAVYYCTREVYSSGYYDYGMDVWGQGTTVTVSS

SEQ ID NO: 32011 - DNA, 369 bp, synthetic construct
  misc_feature 1..369: note = Description of Artificial Sequence: Synthetic polynucleotide
  source 1..369: mol_type = other DNA
caggtgcagctggtggagtctgggggaggcgtggtccagcctgggaggtccctgagactctcctgtgcagcgtctggattcaccttcagtaactatgtcatgcactgggtccgccaggctccaggcaaggggctggagtgggtggcagttatctggtatgatggaagtaataaatactatgcagactccgtgaagggccgattcaccatctccagagacaattccaagaacacgctgtatctgcaaatgaacagcctgagagccgaggacacggctgtgtattactgtacgagagaggtatatagcagtggcttctacgactacggtatggacgtctggggccaagggaccacggtcaccgtgtcctca

SEQ ID NO: 32012 - protein, 123 aa, synthetic construct
  REGION 1..123: note = Description of Artificial Sequence: Synthetic polypeptide
QVQLVESGGGVVQPGRSLRLSCAASGFTFSNYVMHWVRQAPGKGLEWVAVIWYDGSNKYYADSVKGRFTISRDNSKNTLYLQMNSLRAEDTAVYYCTREVYSSGFYDYGMDVWGQGTTVTVSS

SEQ ID NO: 32013 - DNA, 369 bp, synthetic construct
  misc_feature 1..369: note = Description of Artificial Sequence: Synthetic polynucleotide
  source 1..369: mol_type = other DNA
caggtgcagctggtggagtctgggggaggcgtggtccagcctgggaggtccctgagactctcctgtgcagcgtctggattcaccttcagtaactatgtcatgcactgggtccgccaggctccaggcaaggggctggagtgggtggcagttatctggtatgatgcaagtaataaatactatgcagaatccgtgaagggccgattcaccatctccagagacaattccaagaacacgctgtatctgcaaatgaacagcctgagagccgaggacacggctgtgtattactgtacgagagaggtatatagcagtggctattacgactacggtatggacgtctggggccaagggaccacggtcaccgtgtcctca

SEQ ID NO: 32014 - protein, 123 aa, synthetic construct
  REGION 1..123: note = Description of Artificial Sequence: Synthetic polypeptide
QVQLVESGGGVVQPGRSLRLSCAASGFTFSNYVMHWVRQAPGKGLEWVAVIWYDASNKYYAESVKGRFTISRDNSKNTLYLQMNSLRAEDTAVYYCTREVYSSGYYDYGMDVWGQGTTVTVSS

SEQ ID NO: 32015 - DNA, 369 bp, synthetic construct
  misc_feature 1..369: note = Description of Artificial Sequence: Synthetic polynucleotide
  source 1..369: mol_type = other DNA
caggtgcagctggtggagtctgggggaggcgtggtccagcctgggaggtccctgagactctcctgtgcagcgtctggattcaccttcagtaactatgtcatgcactgggtccgccaggctccaggcaaggggctggagtgggtggcagttatctggtatgatgcaagtaataaatactatgcagacgccgtgaagggccgattcaccatctccagagacaattccaagaacacgctgtatctgcaaatgaacagcctgagagccgaggacacggctgtgtattactgtacgagagaggtatatagcagtggctattacgactacggtatggacgtctggggccaagggaccacggtcaccgtgtcctca

SEQ ID NO: 32016 - protein, 123 aa, synthetic construct
  REGION 1..123: note = Description of Artificial Sequence: Synthetic polypeptide
QVQLVESGGGVVQPGRSLRLSCAASGFTFSNYVMHWVRQAPGKGLEWVAVIWYDASNKYYADAVKGRFTISRDNSKNTLYLQMNSLRAEDTAVYYCTREVYSSGYYDYGMDVWGQGTTVTVSS

SEQ ID NO: 32017 - DNA, 369 bp, synthetic construct
  misc_feature 1..369: note = Description of Artificial Sequence: Synthetic polynucleotide
  source 1..369: mol_type = other DNA
gaggtgcagctggtggagtctgggggaggcgtggtccagcctggggggtccctgagactctcctgtgcagcgtctggattcaccttcagtaactatgtcatgcactgggtccgccaggctccaggcaaggggctggagtgggtggcagttatctggtatgatggaagtaataaatactatgcagaatccgtgaagggccgattcaccatctccagagacaatgccaagaacacgctgtatctgcaaatgaacagcctgagagccgaggacacggctgtgtattactgtacgagagaggtatatagcagtggctggtacgactacggtatggacgtctggggccaagggaccacggtcaccgtgtcctca

SEQ ID NO: 32018 - protein, 123 aa, synthetic construct
  REGION 1..123: note = Description of Artificial Sequence: Synthetic polypeptide
EVQLVESGGGVVQPGGSLRLSCAASGFTFSNYVMHWVRQAPGKGLEWVAVIWYDGSNKYYAESVKGRFTISRDNAKNTLYLQMNSLRAEDTAVYYCTREVYSSGWYDYGMDVWGQGTTVTVSS

SEQ ID NO: 32019 - DNA, 354 bp, synthetic construct; identical to SEQ ID NO: 29181
  misc_feature 1..354: note = Description of Artificial Sequence: Synthetic polynucleotide
  source 1..354: mol_type = other DNA

SEQ ID NO: 32020 - protein, 118 aa, synthetic construct; identical to SEQ ID NO: 29182
  REGION 1..118: note = Description of Artificial Sequence: Synthetic polypeptide

SEQ ID NO: 32021 - DNA, 354 bp, synthetic construct; identical to SEQ ID NO: 29181
  misc_feature 1..354: note = Description of Artificial Sequence: Synthetic polynucleotide
  source 1..354: mol_type = other DNA

SEQ ID NO: 32022 - protein, 118 aa, synthetic construct; identical to SEQ ID NO: 29182
  REGION 1..118: note = Description of Artificial Sequence: Synthetic polypeptide

SEQ ID NO: 32023 - DNA, 354 bp, synthetic construct
  misc_feature 1..354: note = Description of Artificial Sequence: Synthetic polynucleotide
  source 1..354: mol_type = other DNA
caggtgcagctggtggagtctgggggaggcgtggtccagcctgggaggtccctgcgactctcctgtgcagcgtctggattcaccttcagtagctttggcatgcactgggtccgccaggctccaggcaaggggctggagtgggtggcaattatctggcatagtggaagtaataaatactatgcagactccgtgaagggccgattcaccatctccagagacaattccaaaaacacgctgtatctgcaaatgagcagcctgcgagccgaggacacggctgtgtattactgtgcgagagatctgagtatgggcggtatggacgtctggggccaagggaccacggtcaccgtgtcctca

SEQ ID NO: 32024 - protein, 118 aa, synthetic construct
  REGION 1..118: note = Description of Artificial Sequence: Synthetic polypeptide
QVQLVESGGGVVQPGRSLRLSCAASGFTFSSFGMHWVRQAPGKGLEWVAIIWHSGSNKYYADSVKGRFTISRDNSKNTLYLQMSSLRAEDTAVYYCARDLSMGGMDVWGQGTTVTVSS

SEQ ID NO: 32025 - DNA, 354 bp, synthetic construct
  misc_feature 1..354: note = Description of Artificial Sequence: Synthetic polynucleotide
  source 1..354: mol_type = other DNA
caggtgcagctggtggagtctgggggaggcgtggtccagcctgggaggtccctgcgactctcctgtgcagcgtctggattcaccttcagtagctttggcatgcactgggtccgccaggctccaggcaaggggctggagtgggtggcaattatctggcatgaaggaagtaataaatactatgcagactccgtgaagggccgattcaccatctccagagacaattccaaaaacacgctgtatctgcaaatgagcagcctgcgagccgaggacacggctgtgtattactgtgcgagagatctgagtatgggcggtatggacgtctggggccaagggaccacggtcaccgtgtcctca

SEQ ID NO: 32026 - protein, 118 aa, synthetic construct
  REGION 1..118: note = Description of Artificial Sequence: Synthetic polypeptide
QVQLVESGGGVVQPGRSLRLSCAASGFTFSSFGMHWVRQAPGKGLEWVAIIWHEGSNKYYADSVKGRFTISRDNSKNTLYLQMSSLRAEDTAVYYCARDLSMGGMDVWGQGTTVTVSS

SEQ ID NO: 32027 - DNA, 354 bp, synthetic construct
  misc_feature 1..354: note = Description of Artificial Sequence: Synthetic polynucleotide
  source 1..354: mol_type = other DNA
caggtgcagctggtggagtctgggggaggcgtggtccagcctgggaggtccctgcgactctcctgtgcagcgtctggattcaccttcagtagctttggcatgcactgggtccgccaggctccaggcaaggggctggagtgggtggcaattatctggcatgatgcaagtaataaatactatgcagactccgtgaagggccgattcaccatctccagagacaattccaaaaacacgctgtatctgcaaatgagcagcctgcgagccgaggacacggctgtgtattactgtgcgagagatctgagtatgggcggtatggacgtctggggccaagggaccacggtcaccgtgtcctca

SEQ ID NO: 32028 - protein, 118 aa, synthetic construct
  REGION 1..118: note = Description of Artificial Sequence: Synthetic polypeptide
QVQLVESGGGVVQPGRSLRLSCAASGFTFSSFGMHWVRQAPGKGLEWVAIIWHDASNKYYADSVKGRFTISRDNSKNTLYLQMSSLRAEDTAVYYCARDLSMGGMDVWGQGTTVTVSS

SEQ ID NO: 32029 - DNA, 354 bp, synthetic construct
  misc_feature 1..354: note = Description of Artificial Sequence: Synthetic polynucleotide
  source 1..354: mol_type = other DNA
caggtgcagctggtggagtctgggggaggcgtggtccagcctgggaggtccctgcgactctcctgtgcagcgtctggattcaccttcagtagctttggcatgcactgggtccgccaggctccaggcaaggggctggagtgggtggcaattatctggcatgatggaagtaataaatactatgcagaatccgtgaagggccgattcaccatctccagagacaattccaaaaacacgctgtatctgcaaatgagcagcctgcgagccgaggacacggctgtgtattactgtgcgagagatctgagtatgggcggtatggacgtctggggccaagggaccacggtcaccgtgtcctca

SEQ ID NO: 32030 - protein, 118 aa, synthetic construct
  REGION 1..118: note = Description of Artificial Sequence: Synthetic polypeptide
QVQLVESGGGVVQPGRSLRLSCAASGFTFSSFGMHWVRQAPGKGLEWVAIIWHDGSNKYYAESVKGRFTISRDNSKNTLYLQMSSLRAEDTAVYYCARDLSMGGMDVWGQGTTVTVSS

SEQ ID NO: 32031 - DNA, 354 bp, synthetic construct
  misc_feature 1..354: note = Description of Artificial Sequence: Synthetic polynucleotide
  source 1..354: mol_type = other DNA
caggtgcagctggtggagtctgggggaggcgtggtccagcctgggaggtccctgcgactctcctgtgcagcgtctggattcaccttcagtagctttggcatgcactgggtccgccaggctccaggcaaggggctggagtgggtggcaattatctggcatgatggaagtaataaatactatgcagacgccgtgaagggccgattcaccatctccagagacaattccaaaaacacgctgtatctgcaaatgagcagcctgcgagccgaggacacggctgtgtattactgtgcgagagatctgagtatgggcggtatggacgtctggggccaagggaccacggtcaccgtgtcctca

SEQ ID NO: 32032 - protein, 118 aa, synthetic construct
  REGION 1..118: note = Description of Artificial Sequence: Synthetic polypeptide
QVQLVESGGGVVQPGRSLRLSCAASGFTFSSFGMHWVRQAPGKGLEWVAIIWHDGSNKYYADAVKGRFTISRDNSKNTLYLQMSSLRAEDTAVYYCARDLSMGGMDVWGQGTTVTVSS

SEQ ID NO: 32033 - DNA, 354 bp, synthetic construct
  misc_feature 1..354: note = Description of Artificial Sequence: Synthetic polynucleotide
  source 1..354: mol_type = other DNA
caggtgcagctggtggagtctgggggaggcgtggtccagcctgggaggtccctgcgactctcctgtgcagcgtctggattcaccttcagtagctttggcatgcactgggtccgccaggctccaggcaaggggctggagtgggtggcaattatctggcatgaaggaagtaataaatactatgcagacgccgtgaagggccgattcaccatctccagagacaattccaaaaacacgctgtatctgcaaatgagcagcctgcgagccgaggacacggctgtgtattactgtgcgagagatctgagtatgggcggtatggacgtctggggccaagggaccacggtcaccgtgtcctca

SEQ ID NO: 32034 - protein, 118 aa, synthetic construct
  REGION 1..118: note = Description of Artificial Sequence: Synthetic polypeptide
QVQLVESGGGVVQPGRSLRLSCAASGFTFSSFGMHWVRQAPGKGLEWVAIIWHEGSNKYYADAVKGRFTISRDNSKNTLYLQMSSLRAEDTAVYYCARDLSMGGMDVWGQGTTVTVSS

SEQ ID NO: 32035 - DNA, 354 bp, synthetic construct
  misc_feature 1..354: note = Description of Artificial Sequence: Synthetic polynucleotide
  source 1..354: mol_type = other DNA
caggtgcagctggtggagtctgggggaggcgtggtccagcctgggaggtccctgcgactctcctgtgcagcgtctggattcaccttcagtagctttggcatgcactgggtccgccaggctccaggcaaggggctggagtgggtggcaattatctggcatgaaggaagtaataaatactatgcagaatccgtgaagggccgattcaccatctccagagacaattccaaaaacacgctgtatctgcaaatgagcagcctgcgagccgaggacacggctgtgtattactgtgcgagagatctgagtatgggcggtatggacgtctggggccaagggaccacggtcaccgtgtcctca

SEQ ID NO: 32036 - protein, 118 aa, synthetic construct
  REGION 1..118: note = Description of Artificial Sequence: Synthetic polypeptide
QVQLVESGGGVVQPGRSLRLSCAASGFTFSSFGMHWVRQAPGKGLEWVAIIWHEGSNKYYAESVKGRFTISRDNSKNTLYLQMSSLRAEDTAVYYCARDLSMGGMDVWGQGTTVTVSS

SEQ ID NO: 32037 - DNA, 354 bp, synthetic construct
  misc_feature 1..354: note = Description of Artificial Sequence: Synthetic polynucleotide
  source 1..354: mol_type = other DNA
caggtgcagctggtggagtctgggggaggcgtggtccagcctgggaggtccctgcgactctcctgtgcagcgtctggattcaccttcagtagctttggcatgcactgggtccgccaggctccaggcaaggggctggagtgggtggcaattatctggcatagtggaagtaataaatactatgcagaatccgtgaagggccgattcaccatctccagagacaattccaaaaacacgctgtatctgcaaatgagcagcctgcgagccgaggacacggctgtgtattactgtgcgagagatctgagtatgggcggtatggacgtctggggccaagggaccacggtcaccgtgtcctca

SEQ ID NO: 32038 - protein, 118 aa, synthetic construct
  REGION 1..118: note = Description of Artificial Sequence: Synthetic polypeptide
QVQLVESGGGVVQPGRSLRLSCAASGFTFSSFGMHWVRQAPGKGLEWVAIIWHSGSNKYYAESVKGRFTISRDNSKNTLYLQMSSLRAEDTAVYYCARDLSMGGMDVWGQGTTVTVSS

SEQ ID NO: 32039 - DNA, 354 bp, synthetic construct
  misc_feature 1..354: note = Description of Artificial Sequence: Synthetic polynucleotide
  source 1..354: mol_type = other DNA
caggtgcagctggtggagtctgggggaggcgtggtccagcctgggaggtccctgcgactctcctgtgcagcgtctggattcaccttcagtagctttggcatgcactgggtccgccaggctccaggcaaggggctggagtgggtggcaattatctggcatagtggaagtaataaatactatgcagacgccgtgaagggccgattcaccatctccagagacaattccaaaaacacgctgtatctgcaaatgagcagcctgcgagccgaggacacggctgtgtattactgtgcgagagatctgagtatgggcggtatggacgtctggggccaagggaccacggtcaccgtgtcctca

SEQ ID NO: 32040 - protein, 118 aa, synthetic construct
  REGION 1..118: note = Description of Artificial Sequence: Synthetic polypeptide
QVQLVESGGGVVQPGRSLRLSCAASGFTFSSFGMHWVRQAPGKGLEWVAIIWHSGSNKYYADAVKGRFTISRDNSKNTLYLQMSSLRAEDTAVYYCARDLSMGGMDVWGQGTTVTVSS

SEQ ID NO: 32041 - DNA, 354 bp, synthetic construct; identical to SEQ ID NO: 32023
  misc_feature 1..354: note = Description of Artificial Sequence: Synthetic polynucleotide
  source 1..354: mol_type = other DNA

SEQ ID NO: 32042 - protein, 118 aa, synthetic construct; identical to SEQ ID NO: 32024
  REGION 1..118: note = Description of Artificial Sequence: Synthetic polypeptide

SEQ ID NO: 32043 - DNA, 354 bp, synthetic construct; identical to SEQ ID NO: 32029
  misc_feature 1..354: note = Description of Artificial Sequence: Synthetic polynucleotide
  source 1..354: mol_type = other DNA

SEQ ID NO: 32044 - protein, 118 aa, synthetic construct; identical to SEQ ID NO: 32030
  REGION 1..118: note = Description of Artificial Sequence: Synthetic polypeptide

SEQ ID NO: 32045 - DNA, 354 bp, synthetic construct; identical to SEQ ID NO: 32037
  misc_feature 1..354: note = Description of Artificial Sequence: Synthetic polynucleotide
  source 1..354: mol_type = other DNA

SEQ ID NO: 32046 - protein, 118 aa, synthetic construct; identical to SEQ ID NO: 32038
  REGION 1..118: note = Description of Artificial Sequence: Synthetic polypeptide

SEQ ID NO: 32047 - DNA, 354 bp, synthetic construct; identical to SEQ ID NO: 32023
  misc_feature 1..354: note = Description of Artificial Sequence: Synthetic polynucleotide
  source 1..354: mol_type = other DNA

SEQ ID NO: 32048 - protein, 118 aa, synthetic construct; identical to SEQ ID NO: 32024
  REGION 1..118: note = Description of Artificial Sequence: Synthetic polypeptide

SEQ ID NO: 32049 - DNA, 354 bp, synthetic construct; identical to SEQ ID NO: 32037
  misc_feature 1..354: note = Description of Artificial Sequence: Synthetic polynucleotide
  source 1..354: mol_type = other DNA

SEQ ID NO: 32050 - protein, 118 aa, synthetic construct; identical to SEQ ID NO: 32038
  REGION 1..118: note = Description of Artificial Sequence: Synthetic polypeptide

SEQ ID NO: 32051 - DNA, 354 bp, synthetic construct; identical to SEQ ID NO: 32033
  misc_feature 1..354: note = Description of Artificial Sequence: Synthetic polynucleotide
  source 1..354: mol_type = other DNA

SEQ ID NO: 32052 - protein, 118 aa, synthetic construct; identical to SEQ ID NO: 32034
  REGION 1..118: note = Description of Artificial Sequence: Synthetic polypeptide

SEQ ID NO: 32053 - DNA, 354 bp, synthetic construct
  misc_feature 1..354: note = Description of Artificial Sequence: Synthetic polynucleotide
  source 1..354: mol_type = other DNA
caggtgcagctggtggagtctgggggaggcgtggtccagcctgggaggtccctgcgactctcctgtgcagcgtctggattcaccttcagtagctttggcatgcactgggtccgccaggctccaggcaaggggctggagtgggtggcaattatctggcatgatgcaagtaataaatactatgcagaatccgtgaagggccgattcaccatctccagagacaattccaaaaacacgctgtatctgcaaatgagcagcctgcgagccgaggacacggctgtgtattactgtgcgagagatctgagtatgggcggtatggacgtctggggccaagggaccacggtcaccgtgtcctca

SEQ ID NO: 32054 - protein, 118 aa, synthetic construct
  REGION 1..118: note = Description of Artificial Sequence: Synthetic polypeptide
QVQLVESGGGVVQPGRSLRLSCAASGFTFSSFGMHWVRQAPGKGLEWVAIIWHDASNKYYAESVKGRFTISRDNSKNTLYLQMSSLRAEDTAVYYCARDLSMGGMDVWGQGTTVTVSS

SEQ ID NO: 32055 - DNA, 354 bp, synthetic construct
  misc_feature 1..354: note = Description of Artificial Sequence: Synthetic polynucleotide
  source 1..354: mol_type = other DNA
gaggtgcagctggtggagtctgggggaggcgtggtccagcctggggggtccctgcgactctcctgtgcagcgtctggattcaccttcagtagctttggcatgcactgggtccgccaggctccaggcaaggggctggagtgggtggcaattatctggcatgatggaagtaataaatactatgcagaatccgtgaagggccgattcaccatctccagagacaatgccaaaaacacgctgtatctgcaaatgagcagcctgcgagccgaggacacggctgtgtattactgtgcgagagatctgagtatgggcggtatggacgtctggggccaagggaccacggtcaccgtgtcctca

SEQ ID NO: 32056 - protein, 118 aa, synthetic construct
  REGION 1..118: note = Description of Artificial Sequence: Synthetic polypeptide
EVQLVESGGGVVQPGGSLRLSCAASGFTFSSFGMHWVRQAPGKGLEWVAIIWHDGSNKYYAESVKGRFTISRDNAKNTLYLQMSSLRAEDTAVYYCARDLSMGGMDVWGQGTTVTVSS

SEQ ID NO: 32057 - DNA, 354 bp, synthetic construct
  misc_feature 1..354: note = Description of Artificial Sequence: Synthetic polynucleotide
  source 1..354: mol_type = other DNA
gaggtgcagctggtggagtctgggggaggcgtggtccagcctggggggtccctgcgactctcctgtgcagcgtctggattcaccttcagtagctttggcatgcactgggtccgccaggctccaggcaaggggctggagtgggtggcaattatctggcatagtggaagtaataaatactatgcagaatccgtgaagggccgattcaccatctccagagacaatgccaaaaacacgctgtatctgcaaatgagcagcctgcgagccgaggacacggctgtgtattactgtgcgagagatctgagtatgggcggtatggacgtctggggccaagggaccacggtcaccgtgtcctca

SEQ ID NO: 32058 - protein, 118 aa, synthetic construct
  REGION 1..118: note = Description of Artificial Sequence: Synthetic polypeptide
EVQLVESGGGVVQPGGSLRLSCAASGFTFSSFGMHWVRQAPGKGLEWVAIIWHSGSNKYYAESVKGRFTISRDNAKNTLYLQMSSLRAEDTAVYYCARDLSMGGMDVWGQGTTVTVSS

SEQ ID NO: 32059 - DNA, 354 bp, synthetic construct
  misc_feature 1..354: note = Description of Artificial Sequence: Synthetic polynucleotide
  source 1..354: mol_type = other DNA
gaggtgcagctggtggagtctgggggaggcgtggtccagcctggggggtccctgcgactctcctgtgcagcgtctggattcaccttcagtagctttggcatgcactgggtccgccaggctccaggcaaggggctggagtgggtggcaattatctggcatgaaggaagtaataaatactatgcagaatccgtgaagggccgattcaccatctccagagacaatgccaaaaacacgctgtatctgcaaatgagcagcctgcgagccgaggacacggctgtgtattactgtgcgagagatctgagtatgggcggtatggacgtctggggccaagggaccacggtcaccgtgtcctca

SEQ ID NO: 32060 - protein, 118 aa, synthetic construct
  REGION 1..118: note = Description of Artificial Sequence: Synthetic polypeptide
EVQLVESGGGVVQPGGSLRLSCAASGFTFSSFGMHWVRQAPGKGLEWVAIIWHEGSNKYYAESVKGRFTISRDNAKNTLYLQMSSLRAEDTAVYYCARDLSMGGMDVWGQGTTVTVSS

SEQ ID NO: 32061 - DNA, 363 bp, synthetic construct
  misc_feature 1..363: note = Description of Artificial Sequence: Synthetic polynucleotide
  source 1..363: mol_type = other DNA
caggtgcagctgcaggagtcgggcccaggactggtgaagccttcacagaccctgtccctcaattgcactgtctctggtggctccatcagcaacagtggttactactggagctggatccgccagcacccagggaagggcctggaatggattgggtacagctattacagtgggagcacctactacaacccgtccctcaagagtcgaattaccatatcagtagacacgtctaacaaccagttctccctgaagctgagctctgtgactgccgcggacacggccgtgtattactgtgcgagagggggatataactggaaccatgcttttgatatctggggccaagggacaatggtcaccgtctcttca

SEQ ID NO: 32062 - protein, 121 aa, synthetic construct
  REGION 1..121: note = Description of Artificial Sequence: Synthetic polypeptide
QVQLQESGPGLVKPSQTLSLNCTVSGGSISNSGYYWSWIRQHPGKGLEWIGYSYYSGSTYYNPSLKSRITISVDTSNNQFSLKLSSVTAADTAVYYCARGGYNWNHAFDIWGQGTMVTVSS

SEQ ID NO: 32063 - DNA, 363 bp, synthetic construct
  misc_feature 1..363: note = Description of Artificial Sequence: Synthetic polynucleotide
  source 1..363: mol_type = other DNA
caggtgcagctggtgcagtctggggctgaggtgaagaagcctggggcctcagtgaaggtctcctgcaaggcttctggatacaccttcaccggctactatatacactgggtgcgacaggcccctggacaaggccttgagtggatgggatggatcaaccctaacagtggtggcacaaactatgcacagaagtttcagggcggggtcaccatgaccaggctcacgtccatcaacacagcctacatggacctgagcaggctgagatctgacgacacggccgtgtattactgtgcgagaggagggaattacttctacaaccacgttatggacgtctggggccaagggaccccggtcaccgtctcctca

SEQ ID NO: 32064 - protein, 121 aa, synthetic construct
  REGION 1..121: note = Description of Artificial Sequence: Synthetic polypeptide
QVQLVQSGAEVKKPGASVKVSCKASGYTFTGYYIHWVRQAPGQGLEWMGWINPNSGGTNYAQKFQGGVTMTRLTSINTAYMDLSRLRSDDTAVYYCARGGNYFYNHVMDVWGQGTPVTVSS

SEQ ID NO: 32065 - DNA, 363 bp, synthetic construct; identical to SEQ ID NO: 32063
  misc_feature 1..363: note = Description of Artificial Sequence: Synthetic polynucleotide
  source 1..363: mol_type = other DNA

SEQ ID NO: 32066 - protein, 121 aa, synthetic construct; identical to SEQ ID NO: 32064
  REGION 1..121: note = Description of Artificial Sequence: Synthetic polypeptide

SEQ ID NO: 32067 - DNA, 354 bp, synthetic construct; identical to SEQ ID NO: 31921
  misc_feature 1..354: note = Description of Artificial Sequence: Synthetic polynucleotide
  source 1..354: mol_type = other DNA

SEQ ID NO: 32068 - protein, 118 aa, synthetic construct; identical to SEQ ID NO: 31922
  REGION 1..118: note = Description of Artificial Sequence: Synthetic polypeptide

SEQ ID NO: 32069 - DNA, 351 bp, synthetic construct
  misc_feature 1..351: note = Description of Artificial Sequence: Synthetic polynucleotide
  source 1..351: mol_type = other DNA
caggtgcagctggtacagtctggggctgaggtgaagaagcctggggcctcagtgaaggtcagctgcaaggcttctggatacaccttcaccgactactatttgcactgggtgcgacaggcccctggacaaggtcttgagtggatgggatggatccaccctaacagtggtggcacaaactatgcacagaagtttcagggcagggtcaccatgaccagggacacgtccatcagcacagcctacatggggctgagcagtctgagatctgacgacacggccgtgtattactgtgcgagagatgctaccagctcgtttgactactggggccagggaaccctggtcaccgtgtcctca

SEQ ID NO: 32070 - protein, 117 aa, synthetic construct
  REGION 1..117: note = Description of Artificial Sequence: Synthetic polypeptide
QVQLVQSGAEVKKPGASVKVSCKASGYTFTDYYLHWVRQAPGQGLEWMGWIHPNSGGTNYAQKFQGRVTMTRDTSISTAYMGLSSLRSDDTAVYYCARDATSSFDYWGQGTLVTVSS

SEQ ID NO: 32071 - DNA, 354 bp, synthetic construct
  misc_feature 1..354: note = Description of Artificial Sequence: Synthetic polynucleotide
  source 1..354: mol_type = other DNA
caggtgcagctggtggagtctgggggaggcgtggtccagcctgggaggtccctgcgactctcctgtgcagcgtctggattcaccttcagtagctttggcatgcactgggtccgccaggctccaggcaaggggctggagtgggtggcaattatctggcatgatgcaagtaataaatactatgcagacgccgtgaagggccgattcaccatctccagagacaattccaaaaacacgctgtatctgcaaatgagcagcctgcgagccgaggacacggctgtgtattactgtgcgagagatctgagtatgggcggtatggacgtctggggccaagggaccacggtcaccgtgtcctca

SEQ ID NO: 32072 - protein, 118 aa, synthetic construct
  REGION 1..118: note = Description of Artificial Sequence: Synthetic polypeptide
QVQLVESGGGVVQPGRSLRLSCAASGFTFSSFGMHWVRQAPGKGLEWVAIIWHDASNKYYADAVKGRFTISRDNSKNTLYLQMSSLRAEDTAVYYCARDLSMGGMDVWGQGTTVTVSS

SEQ ID NO: 32073 - DNA, 354 bp, synthetic construct
  misc_feature 1..354: note = Description of Artificial Sequence: Synthetic polynucleotide
  source 1..354: mol_type = other DNA
caggtgcagctggtgcagtctggggctgaggtgaagaagcctggggcctcagtgaaggtctcctgcaagacttctggatacaccttcaccaattatgatatcaactgggtgcgacaggccactggacaagggcttgagtggatgggatggatgaaccctaacagtggtaacacaggctatgcacagaagttccaggtcagagtcaccatgaccaggaacacctccataagcacagcctacatggaggtgagcagcctgagatctgaggacacggccgtctattactgtgcgtatagcagtggctggtacatctttgactactggggccagggaaccctggtcaccgtctcttca

SEQ ID NO: 32074 - protein, 118 aa, synthetic construct
  REGION 1..118: note = Description of Artificial Sequence: Synthetic polypeptide
QVQLVQSGAEVKKPGASVKVSCKTSGYTFTNYDINWVRQATGQGLEWMGWMNPNSGNTGYAQKFQVRVTMTRNTSISTAYMEVSSLRSEDTAVYYCAYSSGWYIFDYWGQGTLVTVSS

SEQ ID NO: 32075 - DNA, 354 bp, synthetic construct; identical to SEQ ID NO: 29759
  misc_feature 1..354: note = Description of Artificial Sequence: Synthetic polynucleotide
  source 1..354: mol_type = other DNA

SEQ ID NO: 32076 - protein, 118 aa, synthetic construct; identical to SEQ ID NO: 29760
  REGION 1..118: note = Description of Artificial Sequence: Synthetic polypeptide

SEQ ID NO: 32077 - DNA, 345 bp, synthetic construct
  misc_feature 1..345: note = Description of Artificial Sequence: Synthetic polynucleotide
  source 1..345: mol_type = other DNA
gaggtgcagctggtggagtctgggggaggcctggtcaagcctggggggtccctgagactctcctgtgcagcctctggattcaccttcaggagctttagcttgaactgggtccgccaggctccagggaaggggctggagtgggtctcatccattagtagtagtagtagttacatatactacgcagactcagtgaagggccgattcaccatctccagagacaacgccaagaactcactgtatctgcaaatgaacagcctgagagccgaggacacggctgtgtattactgtgcgagagatgcgtatagccactactggggccagggaaccctggtcaccgtctcctca

SEQ ID NO: 32078 - protein, 115 aa, synthetic construct
  REGION 1..115: note = Description of Artificial Sequence: Synthetic polypeptide
EVQLVESGGGLVKPGGSLRLSCAASGFTFRSFSLNWVRQAPGKGLEWVSSISSSSSYIYYADSVKGRFTISRDNAKNSLYLQMNSLRAEDTAVYYCARDAYSHYWGQGTLVTVSS

SEQ ID NO: 32079 - DNA, 351 bp, synthetic construct
  misc_feature 1..351: note = Description of Artificial Sequence: Synthetic polynucleotide
  source 1..351: mol_type = other DNA
gaggtgcagctggtggagtctgggggaggcctggtcaagcctggggggtccctgagactctcctgtgcagcctctggattcaccttcagtagttatagcatgaactgggtccgccaggctccagggaaggggctggagtgggtctcatccattagtggtagtagtagttacatatactacgcagactcagtgaagggccgattcaccatctccagagacaacgccaagaactcactgtatctgcaaatgaacagcctgagagccgaggacacggctgtgtatttctgtgcgagagggggttcgagggggttcgacccctggggccagggaaccctggtcaccgtctcctca

SEQ ID NO: 32080 - protein, 117 aa, synthetic construct
  REGION 1..117: note = Description of Artificial Sequence: Synthetic polypeptide
EVQLVESGGGLVKPGGSLRLSCAASGFTFSSYSMNWVRQAPGKGLEWVSSISGSSSYIYYADSVKGRFTISRDNAKNSLYLQMNSLRAEDTAVYFCARGGSRGFDPWGQGTLVTVSS

SEQ ID NO: 32081 - DNA, 369 bp, synthetic construct
  misc_feature 1..369: note = Description of Artificial Sequence: Synthetic polynucleotide
  source 1..369: mol_type = other DNA
caggtgcagctggtggagtctgggggaggcgtggtccagcctgggaggtccctgagactctcctgtgcagcctccggattcatcttcagtagctatggcatgcactgggtccgccaggctccaggcaaggggctggagtgggtggcagttatatcacaagatggaattattagatactatgcagactccgtgaagggccgattcaccatctccagagacaattccaagaacacgctgtatctgcaaatgaacagcctgagagctgaggacacggctgtgtattactgtgcgagagatgtgaagcagtggctggtacggacctacggtatggacgtctggggccaagggaccacggtcaccgtctcctca

SEQ ID NO: 32082 - protein, 123 aa, synthetic construct
  REGION 1..123: note = Description of Artificial Sequence: Synthetic polypeptide
QVQLVESGGGVVQPGRSLRLSCAASGFIFSSYGMHWVRQAPGKGLEWVAVISQDGIIRYYADSVKGRFTISRDNSKNTLYLQMNSLRAEDTAVYYCARDVKQWLVRTYGMDVWGQGTTVTVSS

SEQ ID NO: 32083 - DNA, 387 bp, synthetic construct
  misc_feature 1..387: note = Description of Artificial Sequence: Synthetic polynucleotide
  source 1..387: mol_type = other DNA
caggtgcagctggtggagtctgggggaggcgtggtccagcctgggaggtccctgagactctcctgtgcagcctctggattcaccttcagttactatggcttgcactgggtccgccaggctccaggcaaggggctggagtgggtggcagttatatcatatgatggaagtaataaatattatgcagactccgtgaagggccgattcaccatctccagagacaattccaagaacacgctgtatctgcaaatgaacaacctgagagctgaggacacggctgtgttttactgtgcgagagaggatcgatattgtagtggtaccagctgcccctactactactactacggtatggacgtctggggccaagggaccacggtcaccgtctcctca

SEQ ID NO: 32084 - protein, 129 aa, synthetic construct
  REGION 1..129: note = Description of Artificial Sequence: Synthetic polypeptide
QVQLVESGGGVVQPGRSLRLSCAASGFTFSYYGLHWVRQAPGKGLEWVAVISYDGSNKYYADSVKGRFTISRDNSKNTLYLQMNNLRAEDTAVFYCAREDRYCSGTSCPYYYYYGMDVWGQGTTVTVSS

SEQ ID NO: 32085 - DNA, 366 bp, synthetic construct; identical to SEQ ID NO: 31475
  misc_feature 1..366: note = Description of Artificial Sequence: Synthetic polynucleotide
  source 1..366: mol_type = other DNA

SEQ ID NO: 32086 - protein, 122 aa, synthetic construct; identical to SEQ ID NO: 31476
  REGION 1..122: note = Description of Artificial Sequence: Synthetic polypeptide

SEQ ID NO: 32087 - DNA, 366 bp, synthetic construct
  misc_feature 1..366: note = Description of Artificial Sequence: Synthetic polynucleotide
  source 1..366: mol_type = other DNA
caggttcagctggtgcagtctggagctgaggtgaagaagcctggggcctcagtgaaggtctcctgcaaggcttctggttacacctttaacagctatggtatcagctgggtgcgactggcccctggacaagggtttgagtggatgggatggatcagcgcttataatggtaacacaaagaatgcacagaagctccagggcagagtcaccatgaccacagacacatccacgagcacagcctacatggagctgaggagcctgagatctgacgacacggccgtttattactgtgcgagacacgatttttggagtggttattataagggtatggacgtctggggccaagggaccacggtcaccgtctcctca

SEQ ID NO: 32088 - protein, 122 aa, synthetic construct
  REGION 1..122: note = Description of Artificial Sequence: Synthetic polypeptide
QVQLVQSGAEVKKPGASVKVSCKASGYTFNSYGISWVRLAPGQGFEWMGWISAYNGNTKNAQKLQGRVTMTTDTSTSTAYMELRSLRSDDTAVYYCARHDFWSGYYKGMDVWGQGTTVTVSS

SEQ ID NO: 32089 - DNA, 366 bp, synthetic construct
  misc_feature 1..366: note = Description of Artificial Sequence: Synthetic polynucleotide
  source 1..366: mol_type = other DNA
caggttcagctggtgcagtctggagctgaggtgaagaagcctggggcctcagtgaaggtctcctgcaaggcttctggttacacctttaacagctatggtatcagctgggtgcgacaggcccctggacaagggcttgagtggatgggatggatcagcgcttataatggtaacacaaagtttgcacagaagctccagggcagagtcaccatgaccacagacacatccacgagcacagcctacatggaactgaggagcctgagatctgacgacacggccgtgtattactgtgcgagacacgatttttggagtggttattataagggtatggacgtctggggccaagggaccacggtcaccgtctcctca

SEQ ID NO: 32090 - protein, 122 aa, synthetic construct
  REGION 1..122: note = Description of Artificial Sequence: Synthetic polypeptide
QVQLVQSGAEVKKPGASVKVSCKASGYTFNSYGISWVRQAPGQGLEWMGWISAYNGNTKFAQKLQGRVTMTTDTSTSTAYMELRSLRSDDTAVYYCARHDFWSGYYKGMDVWGQGTTVTVSS

SEQ ID NO: 32091 - DNA, 387 bp, synthetic construct; identical to SEQ ID NO: 31567
  misc_feature 1..387: note = Description of Artificial Sequence: Synthetic polynucleotide
  source 1..387: mol_type = other DNA

SEQ ID NO: 32092 - protein, 129 aa, synthetic construct; identical to SEQ ID NO: 31568
  REGION 1..129: note = Description of Artificial Sequence: Synthetic polypeptide

SEQ ID NO: 32093 - DNA, 381 bp, synthetic construct
  misc_feature 1..381: note = Description of Artificial Sequence: Synthetic polynucleotide
  source 1..381: mol_type = other DNA
caggtgcagttggtgcagtctggggctgaggtgaagaagcctggggcctcagtgaaggtctcctgcaaggcttctggatacattttcaccggctactatatacactgggtgcgacaggcccctggacaagggcttgagtggatgggatggatcaaccctaacagtggtggcacaaactatgcacagaagtttcagggcagggtcaccatgaccagggacacgtccatcagcacagcctacatggagctgatcaggctgagatctgacgacacggccgtgtattattgtgcgagagaaaacgaaagtctagcaactcgtcctttctacgactactacggtatggacgtctggggccaagggaccacggtcaccgtctcctca

SEQ ID NO: 32094 - protein, 127 aa, synthetic construct
  REGION 1..127: note = Description of Artificial Sequence: Synthetic polypeptide
QVQLVQSGAEVKKPGASVKVSCKASGYIFTGYYIHWVRQAPGQGLEWMGWINPNSGGTNYAQKFQGRVTMTRDTSISTAYMELIRLRSDDTAVYYCARENESLATRPFYDYYGMDVWGQGTTVTVSS

SEQ ID NO: 32095 - DNA, 369 bp, synthetic construct
  misc_feature 1..369: note = Description of Artificial Sequence: Synthetic polynucleotide
  source 1..369: mol_type = other DNA
caggtgcagctggtggagtctgggggaggcgtggtccagcctgggaggtccctgagactctcctgtgcagcgtctggattcacctttagtgactatgtcatgcagtgggtccgccaggctccaggcaaggggctggagtgggtggcagttatatggtatgatggaagtaataaatactatgcagactccgtgaagggccgattcaccatctccagagacatttccaagaacacgctgtatctgcaaatgaacagcctgagagccgaggacacggctgtgtattactgtgcgagagaaccgtataatagtggctggtacgactacggtatggacgtctggggccaagggaccacggtcaccgtctcctca

SEQ ID NO: 32096 - protein, 123 aa, synthetic construct
  REGION 1..123: note = Description of Artificial Sequence: Synthetic polypeptide
QVQLVESGGGVVQPGRSLRLSCAASGFTFSDYVMQWVRQAPGKGLEWVAVIWYDGSNKYYADSVKGRFTISRDISKNTLYLQMNSLRAEDTAVYYCAREPYNSGWYDYGMDVWGQGTTVTVSS

SEQ ID NO: 32097 - DNA, 354 bp, synthetic construct
  misc_feature 1..354: note = Description of Artificial Sequence: Synthetic polynucleotide
  source 1..354: mol_type = other DNA
caggtgcagctggtgcagtctggggctgaggtgaagaagcctggggcctcagtgaaggtctcctgcaaggcttctggattcaccttccccaattatgatatcaactgggtgcgacaggccactggacaaggccttgagtggatgggatggatgcaccctaacagtggtaacacaggctatgcacagaagttccagggcagagtcaccatgaccaggaacacctccataagcacagcctacatggagctgagcagcctgagatctgaggacacggccgtgtattactgtgcgagtagcagtggctggtacttctttgactactggggccagggaaccctggtcaccgtctcctca

SEQ ID NO: 32098 - protein, 118 aa, synthetic construct
  REGION 1..118: note = Description of Artificial Sequence: Synthetic polypeptide
QVQLVQSGAEVKKPGASVKVSCKASGFTFPNYDINWVRQATGQGLEWMGWMHPNSGNTGYAQKFQGRVTMTRNTSISTAYMELSSLRSEDTAVYYCASSSGWYFFDYWGQGTLVTVSS

SEQ ID NO: 32099 - DNA, 372 bp, synthetic construct
  misc_feature 1..372: note = Description of Artificial Sequence: Synthetic polynucleotide
  source 1..372: mol_type = other DNA
caggtgcagctgcaggagtcgggcccaggactggtgaagccttcggagaccctgtccctcacctgcactgtctctagtggctccgtcagcagtggtggttactactggagctggatccggcagcccccagggaagggactggagtggattgggtatatctattacagtgggaccaccatttacaacccctccctcaagagtcgagtcaccatatcagtagacacgtccaagaaccagttctccctgaagctgacctctgtgaccgttgcggacacggccgtgtattactgtgcgcgagacacgttttgctttgatggttgtggttatttctttgactcctggggccagggaaccctggtcaccgtctcctca

SEQ ID NO: 32100 - protein, 124 aa, synthetic construct
  REGION 1..124: note = Description of Artificial Sequence: Synthetic polypeptide
QVQLQESGPGLVKPSETLSLTCTVSSGSVSSGGYYWSWIRQPPGKGLEWIGYIYYSGTTIYNPSLKSRVTISVDTSKNQFSLKLTSVTVADTAVYYCARDTFCFDGCGYFFDSWGQGTLVTVSS

SEQ ID NO: 32101 - DNA, 360 bp, synthetic construct
  misc_feature 1..360: note = Description of Artificial Sequence: Synthetic polynucleotide
  source 1..360: mol_type = other DNA
caggtgcagctggtggagtctgggggaggcgtggtccagcctgggaggtccctgagactctcctgtgcagcgtctggattcatcttcagtagccatggcatgcactgggtccgccaggctccaggcaaggggctggagtgggtggcagttatatggtatgatggaagtaatgaacactatgcagactccgtgaagggccgattcaccatctccagagacaattccaagaacacgctgtatctgcaaatgaacagcctgagagccgaggacacggctgtttattactgtgcgagagatcaaggtgtggggtactacggtatggacgtctggggccaagggaccacggtcaccgtctcctca

SEQ ID NO: 32102 - protein, 120 aa, synthetic construct
  REGION 1..120: note = Description of Artificial Sequence: Synthetic polypeptide
QVQLVESGGGVVQPGRSLRLSCAASGFIFSSHGMHWVRQAPGKGLEWVAVIWYDGSNEHYADSVKGRFTISRDNSKNTLYLQMNSLRAEDTAVYYCARDQGVGYYGMDVWGQGTTVTVSS

SEQ ID NO: 32103 - DNA, 345 bp, synthetic construct
  misc_feature 1..345: note = Description of Artificial Sequence: Synthetic polynucleotide
  source 1..345: mol_type = other DNA
caggtgcagctacagcagtggggcgcaggactgttgaagccttcggagaccctgtccctcacctgcgctgtctatggtgggtccttcagtgtttactattggagctggatccgccagcccccagggaaggggctggagtggattggggaaatcaatcatagtggaagcaccaactacaacccgtccctcaagagtcgagtcaccatttcactagacacgtccaagaaccagttctccctgaagctgagctctgtgaccgccgcggacacggctgtgtattactgtgcgagagactacggtgtctttgactactggggccagggaaccctggtcaccgtctcctca

SEQ ID NO: 32104 - protein, 115 aa, synthetic construct
  REGION 1..115: note = Description of Artificial Sequence: Synthetic polypeptide
QVQLQQWGAGLLKPSETLSLTCAVYGGSFSVYYWSWIRQPPGKGLEWIGEINHSGSTNYNPSLKSRVTISLDTSKNQFSLKLSSVTAADTAVYYCARDYGVFDYWGQGTLVTVSS

SEQ ID NO: 32105 - DNA, 354 bp, synthetic construct; identical to SEQ ID NO: 30067
  misc_feature 1..354: note = Description of Artificial Sequence: Synthetic polynucleotide
  source 1..354: mol_type = other DNA

SEQ ID NO: 32106 - protein, 118 aa, synthetic construct; identical to SEQ ID NO: 30068
  REGION 1..118: note = Description of Artificial Sequence: Synthetic polypeptide

SEQ ID NO: 32107 - DNA, 354 bp, synthetic construct
  misc_feature 1..354: note = Description of Artificial Sequence: Synthetic polynucleotide
  source 1..354: mol_type = other DNA
caggtgcagctggtgcagtctggggctgaggtgaagaagcctggggcctcagtgaaggtctcctgcaaggcttctggatacaccttcaccaattatgatgtcaactgggtgcgacaggccactggacaagggcttgagtggatgggatggatgcaccctaacagtggtaacacaggctatgcacagaagttccagggcagagtcaccatgaccaggaacacctccacaagcacagcctacatggagctgagcagcctgagatctgaggactcggccgtgtattactgtgcgagtagcagtggctggtacctctttgactactggggccagggaaccctggtcaccgtctcctca

SEQ ID NO: 32108 - protein, 118 aa, synthetic construct
  REGION 1..118: note = Description of Artificial Sequence: Synthetic polypeptide
QVQLVQSGAEVKKPGASVKVSCKASGYTFTNYDVNWVRQATGQGLEWMGWMHPNSGNTGYAQKFQGRVTMTRNTSTSTAYMELSSLRSEDSAVYYCASSSGWYLFDYWGQGTLVTVSS

SEQ ID NO: 32109 - DNA, 354 bp, synthetic construct
  misc_feature 1..354: note = Description of Artificial Sequence: Synthetic polynucleotide
  source 1..354: mol_type = other DNA
caggtgcagctggtgcagtctggggctgaggtgaagaagcctggggcctcagtgaaggtctcctgcaaggcttctggattcaccttcaccaattatgatatcaactgggtgcgacaggccactggacaagggcttgagtggatgggatggatgcaccctaacagtggtaacacaggctttgcacagaagttccagggcagagtcacaatgaccaggaacacctccataagcacagcctacatggaactgagcagcctgagatctgaggacacggccgtgtattactgtgcggtttccagtggctggtactggttcgacccctggggccagggaaccctggtcaccgtctcctca

SEQ ID NO: 32110 - protein, 118 aa, synthetic construct; identical to SEQ ID NO: 29724
  REGION 1..118: note = Description of Artificial Sequence: Synthetic polypeptide

SEQ ID NO: 32111 - DNA, 354 bp, synthetic construct
  misc_feature 1..354: note = Description of Artificial Sequence: Synthetic polynucleotide
  source 1..354: mol_type = other DNA
caggtgcagctggtgcagtctggggctgaagtgaagaagcctggggcctcagtgaaggtctcctgcaaggcttctggatacaccttcaccaattatgatatcaactgggtgcgacaggccactggacaagggcttgagtggatgggatggatgcaccctcacagtggtaacacaggctatgcacagaagttccagggcagagtcaccatgaccaggaacacctccataaacacagcctacatggagctgagcagcctgagatctgaggacacggccgtgtattactgtgcccatagcagtggctggtactactttgactactggggccagggaaccctggtcaccgtctcctca

SEQ ID NO: 32112 - protein, 118 aa, synthetic construct
  REGION 1..118: note = Description of Artificial Sequence: Synthetic polypeptide
QVQLVQSGAEVKKPGASVKVSCKASGYTFTNYDINWVRQATGQGLEWMGWMHPHSGNTGYAQKFQGRVTMTRNTSINTAYMELSSLRSEDTAVYYCAHSSGWYYFDYWGQGTLVTVSS

SEQ ID NO: 32113 - DNA, 354 bp, synthetic construct; identical to SEQ ID NO: 28125
  misc_feature 1..354: note = Description of Artificial Sequence: Synthetic polynucleotide
  source 1..354: mol_type = other DNA

SEQ ID NO: 32114 - protein, 118 aa, synthetic construct; identical to SEQ ID NO: 28126
  REGION 1..118: note = Description of Artificial Sequence: Synthetic polypeptide

SEQ ID NO: 32115 - DNA, 387 bp, synthetic construct
  misc_feature 1..387: note = Description of Artificial Sequence: Synthetic polynucleotide
  source 1..387: mol_type = other DNA
caggtgcagctggtgcagtctggggctgaggtgaagaagcctggggcctcagtgaaggtctcctgcaaggcttctggatacaccttcaccagttatgatatcaactgggtgcgacaggccactggacaagggcttgagtggatgggatggctgaaccctcacagtggtaacacaggctatgcacagaagttccagggcagaatcaccatgacctggaacacctccatacgcactgcctacatggagctgagcagcctgagatctgaggacacggccgtgtattactgtgcgagagggttttacgatattttgactggttattcccccacctactactactacgatatggacgtctggggccaagggaccacggtcaccgtctcctca

SEQ ID NO: 32116 - protein, 129 aa, synthetic construct
  REGION 1..129: note = Description of Artificial Sequence: Synthetic polypeptide
QVQLVQSGAEVKKPGASVKVSCKASGYTFTSYDINWVRQATGQGLEWMGWLNPHSGNTGYAQKFQGRITMTWNTSIRTAYMELSSLRSEDTAVYYCARGFYDILTGYSPTYYYYDMDVWGQGTTVTVSS

SEQ ID NO: 32117 - DNA, 387 bp, synthetic construct; identical to SEQ ID NO: 32115
  misc_feature 1..387: note = Description of Artificial Sequence: Synthetic polynucleotide
  source 1..387: mol_type = other DNA

SEQ ID NO: 32118 - protein, 129 aa, synthetic construct; identical to SEQ ID NO: 32116
  REGION 1..129: note = Description of Artificial Sequence: Synthetic polypeptide

SEQ ID NO: 32119 - DNA, 372 bp, synthetic construct
  misc_feature 1..372: note = Description of Artificial Sequence: Synthetic polynucleotide
  source 1..372: mol_type = other DNA
gaggtgcagctgttggagtctgggggaggcttggtacagcctggggggtccctgagactctcctgtgcagcctctggattcacctttagcagctatgccatgagctgggtccgccaggctccagggagggggctggagtgggtctcagctattagtggtagtggtggtaacacattctacgcagactccgtgaagggccggttcaccatctccagagacaattccaagaacacgctgtatctgcaaatgaacagcctgagagccgaggacacggccgtatattactgtgcgatccacggtatagcagtggctggtactggggctcactactttgactactggggccagggaaccctggccaccgtctcctca

SEQ ID NO: 32120 - protein, 124 aa, synthetic construct
  REGION 1..124: note = Description of Artificial Sequence: Synthetic polypeptide
EVQLLESGGGLVQPGGSLRLSCAASGFTFSSYAMSWVRQAPGRGLEWVSAISGSGGNTFYADSVKGRFTISRDNSKNTLYLQMNSLRAEDTAVYYCAIHGIAVAGTGAHYFDYWGQGTLATVSS

SEQ ID NO: 32121 - DNA, 387 bp, synthetic construct; identical to SEQ ID NO: 32115
  misc_feature 1..387: note = Description of Artificial Sequence: Synthetic polynucleotide
  source 1..387: mol_type = other DNA

SEQ ID NO: 32122 - protein, 129 aa, synthetic construct; identical to SEQ ID NO: 32116
  REGION 1..129: note = Description of Artificial Sequence: Synthetic polypeptide

SEQ ID NO: 32123 - DNA, 387 bp, synthetic construct
  misc_feature 1..387: note = Description of Artificial Sequence: Synthetic polynucleotide
  source 1..387: mol_type = other DNA
caggtgcagctggtgcagtctggggctgaggtgaagaagcctggggcctcagtgaaggtctcctgcaaggcttctggatacaccttcaccagttatgatatcaactgggtgcgacaggccactggacaagggcttgagtggatgggatggatgaaccctaacagtggtaacacaggctatgcacagaagttccagggcagagtcaccatgacctggaacacctccatacgcactgcctacatggagctgagcagcctgagatctgaggacacggccgtgtattactgtgcgagagggttttacgatattttgactggttattcccccacctactactactacgatatggacgtctggggccaagggaccacggtcaccgtctcctca

SEQ ID NO: 32124 - protein, 129 aa, synthetic construct
  REGION 1..129: note = Description of Artificial Sequence: Synthetic polypeptide
QVQLVQSGAEVKKPGASVKVSCKASGYTFTSYDINWVRQATGQGLEWMGWMNPNSGNTGYAQKFQGRVTMTWNTSIRTAYMELSSLRSEDTAVYYCARGFYDILTGYSPTYYYYDMDVWGQGTTVTVSS

SEQ ID NO: 32125 - DNA, 372 bp, synthetic construct
  misc_feature 1..372: note = Description of Artificial Sequence: Synthetic polynucleotide
  source 1..372: mol_type = other DNA
gaggtgcagctgttggagtctgggggaggcttggtacagcctggggggtccctgagactctcctgtgcagcctctggattcacctttagcagctatgccatgagctgggtccgccaggctccagggaaggggctggagtgggtctcagctattagtggtagtggtggtaacacattctacgcagactccgtgaagggccggttcaccatctccagagacaattccaagaacacgctgtatctgcaaatgaacagcctgagagccgaggacacggccgtatattactgtgcgatccacggtatagcagtggctggtactggggctcactactttgactactggggccagggaaccctggccaccgtctcctca

SEQ ID NO: 32126 - protein, 124 aa, synthetic construct
  REGION 1..124: note = Description of Artificial Sequence: Synthetic polypeptide
EVQLLESGGGLVQPGGSLRLSCAASGFTFSSYAMSWVRQAPGKGLEWVSAISGSGGNTFYADSVKGRFTISRDNSKNTLYLQMNSLRAEDTAVYYCAIHGIAVAGTGAHYFDYWGQGTLATVSS

SEQ ID NO: 32127 - protein, 113 aa, synthetic construct
  REGION 1..113: note = Description of Artificial Sequence: Synthetic polypeptide
DIVMTQSPDSLAVSLGERATINCKSSQSVLYSSNNKNYLAWYQQKPGQPPKLLIYWASTRESGVPDRFSGSGSGTDFTLTISSLQAEDVAVYYCQQYYSTPFTFGPGTKVDIK

SEQ ID NO: 32128 - protein, 107 aa, synthetic construct
  REGION 1..107: note = Description of Artificial Sequence: Synthetic polypeptide
DIQMTQSPSSLSASVGDRVTITCRASQGIRNDLGWYQQKPGKAPKRLIYAASSLQSGVPSRFSGSGSGTEFTLTISSLQPEDFATYYCLQHNSYPITFGQGTRLEIK

SEQ ID NO: 32129 - protein, 107 aa, synthetic construct
  REGION 1..107: note = Description of Artificial Sequence: Synthetic polypeptide
DIQMTQSPSSVSASVGDRVTITCRASQGISSWLAWYQQKPGKAPKLLIYAASSLQSGVPSRFSGSGSGTDFTLTISSLQPEDFATYYCQQANSFPFTFGPGTKVDIK

SEQ ID NO: 32130 - protein, 113 aa, synthetic construct
  REGION 1..113: note = Description of Artificial Sequence: Synthetic polypeptide
DIVMTQSPDSLAVSLGERATINCKSSQSVLYSSNNKNYLAWYQQKPGQPPKLLIYWASTRESGVPDRFSGSGSGTDFTLTISSLQAEDVAVYYCQQYYSTPWTFGQGTKVEIK

SEQ ID NO: 32131 - protein, 107 aa, synthetic construct
  REGION 1..107: note = Description of Artificial Sequence: Synthetic polypeptide
DIQMTQSPSSLSASVGDRVTITCRASQGIRNDLGWYQQKPGKAPKRLIYAASSLQSGVPSRFSGSGSGTEFTLTISSLQPEDFATYYCLQHNSYPYTFGQGTKLEIK

SEQ ID NO: 32132 - protein, 107 aa, synthetic construct [sequence omitted]

SEQ ID NO: 32133 - protein, 112 aa, synthetic construct
  REGION 1..112: note = Description of Artificial Sequence: Synthetic polypeptide
DIVMTQTPLSLSVTPGQPASISCKSSQSLLHSDGKTYLYWYLQKPGQSPQLLIYEVSSRFSGVPDRFSGSGSGTDFTLKISRVEAEDVGVYYCMQGIHLPLTFGGGTKVEIK

SEQ ID NO: 32134 - protein, 107 aa, synthetic construct
  REGION 1..107: note = Description of Artificial Sequence: Synthetic polypeptide
DIQMTQSPSSLSASVGDRVTITCRASQGISNYLAWFQQKPGKAPKSLIYAASSLQSGVPSRFSGSGSGTDFTLTISSLQPEDFATYYCQQYNSYPFTFGPGTKVDIK

SEQ ID NO: 32135 - protein, 108 aa, synthetic construct
  REGION 1..108: note = Description of Artificial Sequence: Synthetic polypeptide
EIVLTQSPGTLSLSPGERATLSCRASQSVSSSYLAWYQQKPGQAPRLLIYGASSRATGIPDRFSGSGSGTDFTLTISRLEPEDFAVYYCQQYGSSPWTFGQGTKVEIK

SEQ ID NO: 32136 - protein, 107 aa, synthetic construct; identical to SEQ ID NO: 24146
  REGION 1..107: note = Description of Artificial Sequence: Synthetic polypeptide

SEQ ID NO: 32137 - protein, 112 aa, synthetic construct
  REGION 1..112: note = Description of Artificial Sequence: Synthetic polypeptide
DIVMTQTPLSLSVTPGQPASISCKSSQSLLHSDGKTYLYWYLQKPGQSPQLLIYEVSSRFSGVPDRFSGSGSGTDFTLKISRVEAEDVGVYYCMQGIHLPITFGQGTRLEIK

SEQ ID NO: 32138 - protein, 112 aa, synthetic construct
  REGION 1..112: note = Description of Artificial Sequence: Synthetic polypeptide
DIVMTQTPLSLSVTPGQPASISCKSSQSLLHSDGKTYLYWYLQKPGQSPQLLIYEVSSRFSGVPDRFSGSGSGTDFTLKISRVEAEDVGVYYCMQGIHLPWTFGQGTKVEIK

SEQ ID NO: 32139 - protein, 107 aa, synthetic construct; identical to SEQ ID NO: 24244
  REGION 1..107: note = Description of Artificial Sequence: Synthetic polypeptide

SEQ ID NO: 32140 - protein, 107 aa, synthetic construct
  REGION 1..107: note = Description of Artificial Sequence: Synthetic polypeptide
EIVMTQSPATLSVSPGERATLSCRASQSVSSNLAWYQQKPGQAPRLLIYGASTRATGIPARFSGSGSGTEFTLTISSLQSEDFAVYYCQQYNNWPYTFGQGTKLEIK

SEQ ID NO: 32141 - protein, 107 aa, synthetic construct
  REGION 1..107: note = Description of Artificial Sequence: Synthetic polypeptide
EIVMTQSPATLSVSPGERATLSCRASQSVSSNLAWYQQKPGQAPRLLIYGASTRATGIPARFSGSGSGTEFTLTISSLQSEDFAVYYCQQYNNWPLTFGGGTKVEIK

SEQ ID NO: 32142 - protein, 107 aa, synthetic construct; identical to SEQ ID NO: 24296
  REGION 1..107: note = Description of Artificial Sequence: Synthetic polypeptide

SEQ ID NO: 32143 - protein, 107 aa, synthetic construct
  REGION 1..107: note = Description of Artificial Sequence: Synthetic polypeptide
DIQMTQSPSSLSASVGDRVTITCRASQSISSYLNWYQQKPGKAPKLLIYAASSLQSGVPSRFSGSGSGTDFTLTISSLQPEDFATYYCQQSYSTPWTFGQGTKVEIK

SEQ ID NO: 32144 - protein, 113 aa, synthetic construct
  REGION 1..113: note = Description of Artificial Sequence: Synthetic polypeptide
DIVMTQSPDSLAVSLGERATINCKSSQSVLYSSNNKNYLAWYQQKPGQPPKLLIYWASTRESGVPDRFSGSGSGTDFTLTISSLQAEDVAVYYCQQYYSTPYTFGQGTKLEIK

SEQ ID NO: 32145 - protein, 112 aa, synthetic construct
  REGION 1..112: note = Description of Artificial Sequence: Synthetic polypeptide
DVVMTQSPLSLPVTLGQPASISCRSSQSLVYSDGNTYLNWFQQRPGQSPRRLIYKVSNRDSGVPDRFSGSGSGTDFTLKISRVEAEDVGVYYCMQGTHWPLTFGGGTKVEIK

SEQ ID NO: 32146 - protein, 112 aa, synthetic construct
  REGION 1..112: note = Description of Artificial Sequence: Synthetic polypeptide
DVVMTQSPLSLPVTLGQPASISCRSSQSLVYSDGNTYLNWFQQRPGQSPRRLIYKVSNRDSGVPDRFSGSGSGTDFTLKISRVEAEDVGVYYCMQGTHWPFTFGPGTKVDIK

SEQ ID NO: 32147 - protein, 112 aa, synthetic construct
  REGION 1..112: note = Description of Artificial Sequence: Synthetic polypeptide
DVVMTQSPLSLPVTLGQPASISCRSSQSLVYSDGNTYLNWFQQRPGQSPRRLIYKVSNRDSGVPDRFSGSGSGTDFTLKISRVEAEDVGVYYCMQGTHWPITFGQGTRLEIK

SEQ ID NO: 32148 - protein, 107 aa, synthetic construct
  REGION 1..107: note = Description of Artificial Sequence: Synthetic polypeptide
DIQMTQSPSSVSASVGDRVTITCRASQGISSWLAWYQQKPGKAPKLLIYAASSLQSGVPSRFSGSGSGTDFTLTISSLQPEDFATYYCQQANSFPWTFGQGTKVEIK

SEQ ID NO: 32149 - protein, 112 aa, synthetic construct
  REGION 1..112: note = Description of Artificial Sequence: Synthetic polypeptide
DIVMTQSPLSLPVTPGEPASISCRSSQSLLHSNGYNYLDWYLQKPGQSPQLLIYLGSNRASGVPDRFSGSGSGTDFTLKISRVEAEDVGVYYCMQALQTPFTFGPGTKVDIK

SEQ ID NO: 32150 - protein, 107 aa, synthetic construct
  REGION 1..107: note = Description of Artificial Sequence: Synthetic polypeptide
DIQMTQSPSSLSASVGDRVTITCRASQSISSYLNWYQQKPGKAPKLLIYAASSLQSGVPSRFSGSGSGTDFTLTISSLQPEDFATYYCQQSYSTPFTFGPGTKVDIK

SEQ ID NO: 32151 - protein, 112 aa, synthetic construct
  REGION 1..112: note = Description of Artificial Sequence: Synthetic polypeptide
DIVMTQTPLSLSVTPGQPASISCKSSQSLLHSDGKTYLYWYLQKPGQSPQLLIYEVSSRFSGVPDRFSGSGSGTDFTLKISRVEAEDVGVYYCMQGIHLPFTFGPGTKVDIK

SEQ ID NO: 32152 - protein, 107 aa, synthetic construct
  REGION 1..107: note = Description of Artificial Sequence: Synthetic polypeptide
DIQMTQSPSSLSASVGDRVTITCQASQDISNYLNWYQQKPGKAPKLLIYDASNLETGVPSRFSGSGSGTDFTFTISSLQPEDIATYYCQQYDNLPFTFGPGTKVDIK

SEQ ID NO: 32153 - protein, 107 aa, synthetic construct
  REGION 1..107: note = Description of Artificial Sequence: Synthetic polypeptide
DIQMTQSPSSLSASVGDRVTITCQASQDISNYLNWYQQKPGKAPKLLIYDASNLETGVPSRFSGSGSGTDFTFTISSLQPEDIATYYCQQYDNLPLTFGGGTKVEIK

SEQ ID NO: 32154 - protein, 107 aa, synthetic construct
  REGION 1..107: note = Description of Artificial Sequence: Synthetic polypeptide
DIQMTQSPSSLSASVGDRVTITCRASQGISNYLAWFQQKPGKAPKSLIYAASSLQSGVPSRFSGSGSGTDFTLTISSLQPEDFATYYCQQYNSYPWTFGQGTKVEIK

SEQ ID NO: 32155 - protein, 107 aa, synthetic construct
  REGION 1..107: note = Description of Artificial Sequence: Synthetic polypeptide
DIQMTQSPSSLSASVGDRVTITCRASQSISSYLNWYQQKPGKAPKLLIYAASSLQSGVPSRFSGSGSGTDFTLTISSLQPEDFATYYCQQSYSTPITFGQGTRLEIK

SEQ ID NO: 32156 - protein, 108 aa, synthetic construct
  REGION 1..108: note = Description of Artificial Sequence: Synthetic polypeptide
EIVLTQSPGTLSLSPGERATLSCRASQSVSSSYLAWYQQKPGQAPRLLIYGASSRATGIPDRFSGSGSGTDFTLTISRLEPEDFAVYYCQQYGSSPYTFGQGTKLEIK

SEQ ID NO: 32157 - protein, 107 aa, synthetic construct
  REGION 1..107: note = Description of Artificial Sequence: Synthetic polypeptide
DIQMTQSPSSLSASVGDRVTITCRASQGISNYLAWFQQKPGKAPKSLIYAASSLQSGVPSRFSGSGSGTDFTLTISSLQPEDFATYYCQQYNSYPLTFGGGTKVEIK

SEQ ID NO: 32158 - protein, 107 aa, synthetic construct
  REGION 1..107: note = Description of Artificial Sequence: Synthetic polypeptide
DIQMTQSPSSLSASVGDRVTITCQASQDISNYLNWYQQKPGKAPKLLIYDASNLETGVPSRFSGSGSGTDFTFTISSLQPEDIATYYCQQYDNLPITFGQGTRLEIK

SEQ ID NO: 32159 - protein, 107 aa, synthetic construct
  REGION 1..107: note = Description of Artificial Sequence: Synthetic polypeptide
EIVMTQSPATLSVSPGERATLSCRASQSVSSNLAWYQQKPGQAPRLLIYGASTRATGIPARFSGSGSGTEFTLTISSLQSEDFAVYYCQQYNNWPFTFGPGTKVDIK

SEQ ID NO: 32160 - protein, 112 aa, synthetic construct
  REGION 1..112: note = Description of Artificial Sequence: Synthetic polypeptide
DIVMTQSPLSLPVTPGEPASISCRSSQSLLHSNGYNYLDWYLQKPGQSPQLLIYLGSNRASGVPDRFSGSGSGTDFTLKISRVEAEDVGVYYCMQALQTPITFGQGTRLEIK

SEQ ID NO: 32161 - protein, 107 aa, synthetic construct
  REGION 1..107: note = Description of Artificial Sequence: Synthetic polypeptide
DIQMTQSPSSVSASVGDRVTITCRASQGISSWLAWYQQKPGKAPKLLIYAASSLQSGVPSRFSGSGSGTDFTLTISSLQPEDFATYYCQQANSFPLTFGGGTKVEIK

SEQ ID NO: 32162 - protein, 107 aa, synthetic construct
  REGION 1..107: note = Description of Artificial Sequence: Synthetic polypeptide
DIQMTQSPSSLSASVGDRVTITCRASQSISSYLNWYQQKPGKAPKLLIYAASSLQSGVPSRFSGSGSGTDFTLTISSLQPEDFATYYCQQSYSTPYTFGQGTKLEIK

SEQ ID NO: 32163 - protein, 108 aa, synthetic construct
  REGION 1..108: note = Description of Artificial Sequence: Synthetic polypeptide
EIVLTQSPGTLSLSPGERATLSCRASQSVSSSYLAWYQQKPGQAPRLLIYGASSRATGIPDRFSGSGSGTDFTLTISRLEPEDFAVYYCQQYGSSPFTFGPGTKVDIK

SEQ ID NO: 32164 - protein, 107 aa, synthetic construct
  REGION 1..107: note = Description of Artificial Sequence: Synthetic polypeptide
DIQMTQSPSSLSASVGDRVTITCQASQDISNYLNWYQQKPGKAPKLLIYDASNLETGVPSRFSGSGSGTDFTFTISSLQPEDIATYYCQQYDNLPWTFGQGTKVEIK

SEQ ID NO: 32165 - protein, 107 aa, synthetic construct
  REGION 1..107: note = Description of Artificial Sequence: Synthetic polypeptide
DIQMTQSPSSLSASVGDRVTITCRASQGISNYLAWYQQKPGKVPKLLIYAASTLQSGVPSRFSGSGSGTDFTLTISSLQPEDVATYYCQKYNSAPLTFGGGTKVEIK

SEQ ID NO: 32166 - protein, 108 aa, synthetic construct
  REGION 1..108: note = Description of Artificial Sequence: Synthetic polypeptide
EIVLTQSPGTLSLSPGERATLSCRASQSVSSSYLAWYQQKPGQAPRLLIYGASSRATGIPDRFSGSGSGTDFTLTISRLEPEDFAVYYCQQYGSSPLTFGGGTKVEIK

SEQ ID NO: 32167 - protein, 113 aa, synthetic construct
  REGION 1..113: note = Description of Artificial Sequence: Synthetic polypeptide
DIVMTQSPDSLAVSLGERATINCKSSQSVLYSSNNKNYLAWYQQKPGQPPKLLIYWASTRESGVPDRFSGSGSGTDFTLTISSLQAEDVAVYYCQQYYSTPLTFGGGTKVEIK

SEQ ID NO: 32168 - protein, 112 aa, synthetic construct
  REGION 1..112: note = Description of Artificial Sequence: Synthetic polypeptide
DIVMTQSPLSLPVTPGEPASISCRSSQSLLHSNGYNYLDWYLQKPGQSPQLLIYLGSNRASGVPDRFSGSGSGTDFTLKISRVEAEDVGVYYCMQALQTPLTFGGGTKVEIK

SEQ ID NO: 32169 - protein, 107 aa, synthetic construct
  REGION 1..107: note = Description of Artificial Sequence: Synthetic polypeptide
EIVMTQSPATLSVSPGERATLSCRASQSVSSNLAWYQQKPGQAPRLLIYGASTRATGIPARFSGSGSGTEFTLTISSLQSEDFAVYYCQQYNNWPWTFGQGTKVEIK

SEQ ID NO: 32170 - protein, 107 aa, synthetic construct
  REGION 1..107: note = Description of Artificial Sequence: Synthetic polypeptide
DIQMTQSPSSLSASVGDRVTITCRASQGISNYLAWFQQKPGKAPKSLIYAASSLQSGVPSRFSGSGSGTDFTLTISSLQPEDFATYYCQQYNSYPITFGQGTRLEIK

SEQ ID NO: 32171 - protein, 113 aa, synthetic construct
  REGION 1..113: note = Description of Artificial Sequence: Synthetic polypeptide
DIVMTQSPDSLAVSLGERATINCKSSQSVLYSSNNKNYLAWYQQKPGQPPKLLIYWASTRESGVPDRFSGSGSGTDFTLTISSLQAEDVAVYYCQQYYSTPITFGQGTRLEIK

SEQ ID NO: 32172 - protein, 112 aa, synthetic construct
  REGION 1..112: note = Description of Artificial Sequence: Synthetic polypeptide
DIVMTQSPLSLPVTPGEPASISCRSSQSLLHSNGYNYLDWYLQKPGQSPQLLIYLGSNRASGVPDRFSGSGSGTDFTLKISRVEAEDVGVYYCMQALQTPWTFGQGTKVEIK

SEQ ID NO: 32173 - protein, 107 aa, synthetic construct
  REGION 1..107: note = Description of Artificial Sequence: Synthetic polypeptide
EIVLTQSPDFQSVTPKEKVTITCRASQSIGSSLHWYQQKPDQSPKLLIKYASQSFSGVPSRFSGSGSGTDFTLTINSLEAEDAATYYCHQSSSLPWTFGQGTKVEIK

SEQ ID NO: 32174 - protein, 107 aa, synthetic construct
  REGION 1..107: note = Description of Artificial Sequence: Synthetic polypeptide
EIVLTQSPDFQSVTPKEKVTITCRASQSIGSSLHWYQQKPDQSPKLLIKYASQSFSGVPSRFSGSGSGTDFTLTINSLEAEDAATYYCHQSSSLPLTFGGGTKVEIK

SEQ ID NO: 32175 - protein, 107 aa, synthetic construct
  REGION 1..107: note = Description of Artificial Sequence: Synthetic polypeptide
DIQMTQSPSSLSASVGDRVTITCRASQGISNYLAWYQQKPGKVPKLLIYAASTLQSGVPSRFSGSGSGTDFTLTISSLQPEDVATYYCQKYNSAPFTFGPGTKVDIK

SEQ ID NO: 32176 - protein, 107 aa, synthetic construct
  REGION 1..107: note = Description of Artificial Sequence: Synthetic polypeptide
EIVLTQSPDFQSVTPKEKVTITCRASQSIGSSLHWYQQKPDQSPKLLIKYASQSFSGVPSRFSGSGSGTDFTLTINSLEAEDAATYYCHQSSSLPFTFGPGTKVDIK

SEQ ID NO: 32177 - protein, 107 aa, synthetic construct
  REGION 1..107: note = Description of Artificial Sequence: Synthetic polypeptide
DIQMTQSPSSVSASVGDRVTITCRASQGISSWLAWYQQKPGKAPKLLIYAASSLQSGVPSRFSGSGSGTDFTLTISSLQPEDFATYYCQQANSFPYTFGQGTKLEIK

SEQ ID NO: 32178 - protein, 112 aa, synthetic construct
  REGION 1..112: note = Description of Artificial Sequence: Synthetic polypeptide
DIVMTQSPLSLPVTPGEPASISCRSSQSLLHSNGYNYLDWYLQKPGQSPQLLIYLGSNRASGVPDRFSGSGSGTDFTLKISRVEAEDVGVYYCMQALQTPYTFGQGTKLEIK

SEQ ID NO: 32179 - protein, 112 aa, synthetic construct
  REGION 1..112: note = Description of Artificial Sequence: Synthetic polypeptide
DVVMTQSPLSLPVTLGQPASISCRSSQSLVYSDGNTYLNWFQQRPGQSPRRLIYKVSNRDSGVPDRFSGSGSGTDFTLKISRVEAEDVGVYYCMQGTHWPWTFGQGTKVEIK

SEQ ID NO: 32180 - protein, 107 aa, synthetic construct
  REGION 1..107: note = Description of Artificial Sequence: Synthetic polypeptide
DIQMTQSPSSLSASVGDRVTITCRASQGISNYLAWYQQKPGKVPKLLIYAASTLQSGVPSRFSGSGSGTDFTLTISSLQPEDVATYYCQKYNSAPITFGQGTRLEIK

SEQ ID NO: 32181 - protein, 107 aa, synthetic construct
  REGION 1..107: note = Description of Artificial Sequence: Synthetic polypeptide
DIQMTQSPSSLSASVGDRVTITCRASQGISNYLAWFQQKPGKAPKSLIYAASSLQSGVPSRFSGSGSGTDFTLTISSLQPEDFATYYCQQYNSYPYTFGQGTKLEIK

SEQ ID NO: 32182 - protein, 107 aa, synthetic construct; identical to SEQ ID NO: 24296
  REGION 1..107: note = Description of Artificial Sequence: Synthetic polypeptide

SEQ ID NO: 32183 - protein, 107 aa, synthetic construct; identical to SEQ ID NO: 32148
  REGION 1..107: note = Description of Artificial Sequence: Synthetic polypeptide

SEQ ID NO: 32184 - protein, 107 aa, synthetic construct
  REGION 1..107: note = Description of Artificial Sequence: Synthetic polypeptide
SYELTQPPSVSVSPGQTASITCSGDKLGDKYACWYQQKPGQSPVLVIYQDSKRPSGIPERFSGSNSGNTATLTISGTQAMDEADYYCQAWDSSTAVVFGGGTKLTVL

SEQ ID NO: 32185 - protein, 111 aa, synthetic construct
  REGION 1..111: note = Description of Artificial Sequence: Synthetic polypeptide
QSALTQPASVSGSPGQSITISCTGTSSDVGGYNYVSWYQQHPGKAPKLMIYEVSNRPSGVSNRFSGSKSGNTASLTISGLQAEDEADYYCSSYTSSSTLWVFGGGTKLTVL

SEQ ID NO: 32186 - protein, 110 aa, synthetic construct
  REGION 1..110: note = Description of Artificial Sequence: Synthetic polypeptide
QSVLTQPPSASGTPGQRVTISCSGSSSNIGSNTVNWYQQLPGTAPKLLIYSNNQRPSGVPDRFSGSKSGTSASLAISGLQSEDEADYYCAAWDDSLNGVVFGGGTKLTVL

SEQ ID NO: 32187 - protein, 108 aa, synthetic construct
  REGION 1..108: note = Description of Artificial Sequence: Synthetic polypeptide
SYELTQPPSVSVSPGQTARITCSGDALPKKYAYWYQQKSGQAPVLVIYEDSKRPSGIPERFSGSSSGTMATLTISGAQVEDEADYYCYSTDSSGNHVVFGGGTKLTVL

SEQ ID NO: 32188 - protein, 110 aa, synthetic construct
  REGION 1..110: note = Description of Artificial Sequence: Synthetic polypeptide
QSVLTQPPSASGTPGQRVTISCSGSSSNIGSNTVNWYQQLPGTAPKLLIYSNNQRPSGVPDRFSGSKSGTSASLAISGLQSEDEADYYCAAWDDSLNGWVFGGGTKLTVL

SEQ ID NO: 32189 - protein, 107 aa, synthetic construct
  REGION 1..107: note = Description of Artificial Sequence: Synthetic polypeptide
SYELTQPPSVSVSPGQTASITCSGDKLGDKYACWYQQKPGQSPVLVIYQDSKRPSGIPERFSGSNSGNTATLTISGTQAMDEADYYCQAWDSSTAYVFGTGTKVTVL

SEQ ID NO: 32190 - protein, 116 aa, synthetic construct
  REGION 1..116: note = Description of Artificial Sequence: Synthetic polypeptide
QAVLTQPASLSASPGASASLTCTLRSGINVGTYRIYWYQQKPGSPPQYLLRYKSDSDKQQGSGVPSRFSGSKDASANAGILLISGLQSEDEADYYCMIWHSSASWVFGGGTKLTVL

SEQ ID NO: 32191 - protein, 111 aa, synthetic construct
  REGION 1..111: note = Description of Artificial Sequence: Synthetic polypeptide
QSVLTQPPSVSGAPGQRVTISCTGSSSNIGAGYDVHWYQQLPGTAPKLLIYGNSNRPSGVPDRFSGSKSGTSASLAITGLQAEDEADYYCQSYDSSLSGVVFGGGTKLTVL

SEQ ID NO: 32192 - protein, 110 aa, synthetic construct
  REGION 1..110: note = Description of Artificial Sequence: Synthetic polypeptide
NFMLTQPHSVSESPGKTVTISCTRSSGSIASNYVQWYQQRPGSSPTTVIYEDNQRPSGVPDRFSGSIDSSSNSASLTISGLKTEDEADYYCQSYDSSNWVFGGGTKLTVL

SEQ ID NO: 32193 - protein, 108 aa, synthetic construct
  REGION 1..108: note = Description of Artificial Sequence: Synthetic polypeptide
SSELTQDPAVSVALGQTVRITCQGDSLRSYYASWYQQKPGQAPVLVIYGKNNRPSGIPDRFSGSSSGNTASLTITGAQAEDEADYYCNSRDSSGNHVVFGGGTKLTVL

SEQ ID NO: 32194 - protein, 111 aa, synthetic construct
  REGION 1..111: note = Description of Artificial Sequence: Synthetic polypeptide
QSALTQPASVSGSPGQSITISCTGTSSDVGSYNLVSWYQQHPGKAPKLMIYEVSKRPSGVSNRFSGSKSGNTASLTISGLQAEDEADYYCCSYAGSSTFVVFGGGTKLTVL

SEQ ID NO: 32195 - protein, 108 aa, synthetic construct
  REGION 1..108: note = Description of Artificial Sequence: Synthetic polypeptide
SSELTQDPAVSVALGQTVRITCQGDSLRSYYASWYQQKPGQAPVLVIYGKNNRPSGIPDRFSGSSSGNTASLTITGAQAEDEADYYCNSRDSSGNHWVFGGGTKLTVL

SEQ ID NO: 32196 - protein, 111 aa, synthetic construct
  REGION 1..111: note = Description of Artificial Sequence: Synthetic polypeptide
QSVLTQPPSVSGAPGQRVTISCTGSSSNIGAGYDVHWYQQLPGTAPKLLIYGNSNRPSGVPDRFSGSKSGTSASLAITGLQAEDEADYYCQSYDSSLSGYVFGTGTKVTVL

SEQ ID NO: 32197 - protein, 107 aa, synthetic construct
  REGION 1..107: note = Description of Artificial Sequence: Synthetic polypeptide
SYELTQPPSVSVSPGQTASITCSGDKLGDKYACWYQQKPGQSPVLVIYQDSKRPSGIPERFSGSNSGNTATLTISGTQAMDEADYYCQAWDSSTAAVFGGGTQLTVL

SEQ ID NO: 32198 - protein, 110 aa, synthetic construct
  REGION 1..110: note = Description of Artificial Sequence: Synthetic polypeptide
QSVLTQPPSVSAAPGQKVTISCSGSSSNIGNNYVSWYQQLPGTAPKLLIYDNNKRPSGIPDRFSGSKSGTSATLGITGLQTGDEADYYCGTWDSSLSAVVFGGGTKLTVL

SEQ ID NO: 32199 - protein, 110 aa, synthetic construct
  REGION 1..110: note = Description of Artificial Sequence: Synthetic polypeptide
NFMLTQPHSVSESPGKTVTISCTRSSGSIASNYVQWYQQRPGSSPTTVIYEDNQRPSGVPDRFSGSIDSSSNSASLTISGLKTEDEADYYCQSYDSSNVVFGGGTKLTVL

SEQ ID NO: 32200 - protein, 110 aa, synthetic construct
  REGION 1..110: note = Description of Artificial Sequence: Synthetic polypeptide
QTVVTQEPSFSVSPGGTVTLTCGLSSGSVSTSYYPSWYQQTPGQAPRTLIYSTNTRSSGVPDRFSGSILGNKAALTITGAQADDESDYYCVLYMGSGIWVFGGGTKLTVL

SEQ ID NO: 32201 - protein, 110 aa, synthetic construct
  REGION 1..110: note = Description of Artificial Sequence: Synthetic polypeptide
QTVVTQEPSLTVSPGGTVTLTCASSTGAVTSGYYPNWFQQKPGQAPRALIYSTSNKHSWTPARFSGSLLGGKAALTLSGVQPEDEAEYYCLLYYGGAQVVFGGGTKLTVL

SEQ ID NO: 32202 - protein, 110 aa, synthetic construct
  REGION 1..110: note = Description of Artificial Sequence: Synthetic polypeptide
QSVLTQPPSVSAAPGQKVTISCSGSSSNIGNNYVSWYQQLPGTAPKLLIYDNNKRPSGIPDRFSGSKSGTSATLGITGLQTGDEADYYCGTWDSSLSAWVFGGGTKLTVL

SEQ ID NO: 32203 - protein, 110 aa, synthetic construct
  REGION 1..110: note = Description of Artificial Sequence: Synthetic polypeptide
QSVLTQPPSVSAAPGQKVTISCSGSSSNIGNNYVSWYQQLPGTAPKLLIYDNNKRPSGIPDRFSGSKSGTSATLGITGLQTGDEADYYCGTWDSSLSAYVFGTGTKVTVL

SEQ ID NO: 32204 - protein, 116 aa, synthetic construct
  REGION 1..116: note = Description of Artificial Sequence: Synthetic polypeptide
QAVLTQPASLSASPGASASLTCTLRSGINVGTYRIYWYQQKPGSPPQYLLRYKSDSDKQQGSGVPSRFSGSKDASANAGILLISGLQSEDEADYYCMIWHSSASVVFGGGTKLTVL

SEQ ID NO: 32205 - protein, 107 aa, synthetic construct
  REGION 1..107: note = Description of Artificial Sequence: Synthetic polypeptide
SYELTQPLSVSVALGQTARITCGGNNIGSKNVHWYQQKPGQAPVLVIYRDSNRPSGIPERFSGSNSGNTATLTISRAQAGDEADYYCQVWDSSTAVVFGGGTKLTVL

SEQ ID NO: 32206 - protein, 111 aa, synthetic construct
  REGION 1..111: note = Description of Artificial Sequence: Synthetic polypeptide
QSALTQPASVSGSPGQSITISCTGTSSDVGGYNYVSWYQQHPGKAPKLMIYEVSNRPSGVSNRFSGSKSGNTASLTISGLQAEDEADYYCSSYTSSSTLVVFGGGTKLTVL

SEQ ID NO: 32207 - protein, 108 aa, synthetic construct
  REGION 1..108: note = Description of Artificial Sequence: Synthetic polypeptide
SYELMQPPSVSVSPGQTARITCSGDALPKQYAYWYQQKPGQAPVLVIYKDSERPSGIPERFSGSSSGTTVTLTISGVQAEDEADYYCQSADSSGTYYVFGTGTKVTVL

SEQ ID NO: 32208 - protein, 115 aa, synthetic construct
  REGION 1..115: note = Description of Artificial Sequence: Synthetic polypeptide
LPVLTQPPSASALLGASIKLTCTLSSEHSTYTIEWYQQRPGRSPQYIMKVKSDGSHSKGDGIPDRFMGSSSGADRYLTFSNLQSDDEAEYHCGESHTIDGQVGVVFGGGTKLTVL

SEQ ID NO: 32209 - protein, 108 aa, synthetic construct
  REGION 1..108: note = Description of Artificial Sequence: Synthetic polypeptide
SYVLTQPPSVSVAPGKTARITCGGNNIGSKSVHWYQQKPGQAPVLVIYYDSDRPSGIPERFSGSNSGNTATLTISRVEAGDEADYYCQVWDSSSDHVVFGGGTKLTVL

SEQ ID NO: 32210 - protein, 120 aa, synthetic construct
  REGION 1..120: note = Description of Artificial Sequence: Synthetic polypeptide
QVQLVQSGAEVKKPGASVKVSCKASGYTFTSYDINWVRQATGQGLEWMGWMNPNSGNTGYAQKFQGRVTMTRNTSISTAYMELSSLRSEDTAVYYCARGYSSGWYYFDYWGQGTLVTVSS

SEQ ID NO: 32211 - protein, 118 aa, synthetic construct
  REGION 1..118: note = Description of Artificial Sequence: Synthetic polypeptide
QVQLVQSGAEVKKPGASVKVSCKASGYTFTGYYMHWVRQAPGQGLEWMGWINPNSGGTNYAQKFQGRVTMTRDTSISTAYMELSRLRSDDTAVYYCARGTTGTYFDYWGQGTLVTVSS

SEQ ID NO: 32212 - protein, 124 aa, synthetic construct
  REGION 1..124: note = Description of Artificial Sequence: Synthetic polypeptide
QVQLVESGGGVVQPGRSLRLSCAASGFTFSSYGMHWVRQAPGKGLEWVAVIWYDGSNKYYADSVKGRFTISRDNSKNTLYLQMNSLRAEDTAVYYCAREYSSSSYYYYYGMDVWGQGTTVTVSS

SEQ ID NO: 32213 - protein, 122 aa, synthetic construct
  REGION 1..122: note = Description of Artificial Sequence: Synthetic polypeptide
QVQLVESGGGVVQPGRSLRLSCAASGFTFSSYGMHWVRQAPGKGLEWVAVIWYDGSNKYYADSVKGRFTISRDNSKNTLYLQMNSLRAEDTAVYYCARDIVLMVYAIYFDYWGQGTLVTVSS

SEQ ID NO: 32214 - protein, 119 aa, synthetic construct
  REGION 1..119: note = Description of Artificial Sequence: Synthetic polypeptide
QVQLVESGGGVVQPGRSLRLSCAASGFTFSSYGMHWVRQAPGKGLEWVAVIWYDGSNKYYADSVKGRFTISRDNSKNTLYLQMNSLRAEDTAVYYCAREYSSSSYFDYWGQGTLVTVSS

SEQ ID NO: 32215 - protein, 124 aa, synthetic construct
  REGION 1..124: note = Description of Artificial Sequence: Synthetic polypeptide
QVQLVESGGGVVQPGRSLRLSCAASGFTFSSYAMHWVRQAPGKGLEWVAVISYDGSNKYYADSVKGRFTISRDNSKNTLYLQMNSLRAEDTAVYYCARGIAVAGYYYYYGMDVWGQGTTVTVSS

SEQ ID NO: 32216 - protein, 121 aa, synthetic construct
  REGION 1..121: note = Description of Artificial Sequence: Synthetic polypeptide
QVQLVQSGAEVKKPGASVKVSCKASGYTFTSYDINWVRQATGQGLEWMGWMNPNSGNTGYAQKFQGRVTMTRNTSISTAYMELSSLRSEDTAVYYCARGYSSGWYNWFDPWGQGTLVTVSS

SEQ ID NO: 32217 - protein, 119 aa, synthetic construct
  REGION 1..119: note = Description of Artificial Sequence: Synthetic polypeptide
QVQLVESGGGVVQPGRSLRLSCAASGFTFSSYAMHWVRQAPGKGLEWVAVISYDGSNKYYADSVKGRFTISRDNSKNTLYLQMNSLRAEDTAVYYCARGYSYGYYFDYWGQGTLVTVSS

SEQ ID NO: 32218 - protein, 120 aa, synthetic construct
  REGION 1..120: note = Description of Artificial Sequence: Synthetic polypeptide
QVQLVQSGAEVKKPGASVKVSCKASGYTFTSYGISWVRQAPGQGLEWMGWISAYNGNTNYAQKLQGRVTMTTDTSTSTAYMELRSLRSDDTAVYYCARGIAVAGNWFDPWGQGTLVTVSS

SEQ ID NO: 32219 - protein, 124 aa, synthetic construct
  REGION 1..124: note = Description of Artificial Sequence: Synthetic polypeptide
QVQLVESGGGVVQPGRSLRLSCAASGFTFSSYGMHWVRQAPGKGLEWVAVIWYDGSNKYYADSVKGRFTISRDNSKNTLYLQMNSLRAEDTAVYYCARDYGGNSYYYYYGMDVWGQGTTVTVSS

SEQ ID NO: 32220 - protein, 118 aa, synthetic construct
  REGION 1..118: note = Description of Artificial Sequence: Synthetic polypeptide
QVQLVQSGAEVKKPGASVKVSCKASGYTFTGYYMHWVRQAPGQGLEWMGWINPNSGGTNYAQKFQGRVTMTRDTSISTAYMELSRLRSDDTAVYYCARDYSNYYFDYWGQGTLVTVSS

SEQ ID NO: 32221 - protein, 115 aa, synthetic construct
  REGION 1..115: note = Description of Artificial Sequence: Synthetic polypeptide
QVQLQESGPGLVKPSETLSLTCTVSGGSISSYYWSWIRQPPGKGLEWIGYIYYSGSTNYNPSLKSRVTISVDTSKNQFSLKLSSVTAADTAVYYCARLTGYFDYWGQGTLVTVSS

SEQ ID NO: 32222 - protein, 122 aa, synthetic construct
  REGION 1..122: note = Description of Artificial Sequence: Synthetic polypeptide
QVQLQQWGAGLLKPSETLSLTCAVYGGSFSGYYWSWIRQPPGKGLEWIGEINHSGSTNYNPSLKSRVTISVDTSKNQFSLKLSSVTAADTAVYYCARDYGDYYYYYYGMDVWGQGTTVTVSS

SEQ ID NO: 32223 - protein, 123 aa, synthetic construct
  REGION 1..123: note = Description of Artificial Sequence: Synthetic polypeptide
QVQLVESGGGVVQPGRSLRLSCAASGFTFSSYGMHWVRQAPGKGLEWVAVIWYDGSNKYYADSVKGRFTISRDNSKNTLYLQMNSLRAEDTAVYYCARDYGDYYYYYYGMDVWGQGTTVTVSS

SEQ ID NO: 32224 - protein, 118 aa, synthetic construct
  REGION 1..118: note = Description of Artificial Sequence: Synthetic polypeptide
QVQLVESGGGVVQPGRSLRLSCAASGFTFSSYGMHWVRQAPGKGLEWVAVIWYDGSNKYYADSVKGRFTISRDNSKNTLYLQMNSLRAEDTAVYYCARDYGDYYFDYWGQGTLVTVSS

SEQ ID NO: 32225 - protein, 116 aa, synthetic construct
  REGION 1..116: note = Description of Artificial Sequence: Synthetic polypeptide
QVQLVESGGGVVQPGRSLRLSCAASGFTFSSYGMHWVRQAPGKGLEWVAVIWYDGSNKYYADSVKGRFTISRDNSKNTLYLQMNSLRAEDTAVYYCARLTGYFDYWGQGTLVTVSS

SEQ ID NO: 32226 - protein, 124 aa, synthetic construct
  REGION 1..124: note = Description of Artificial Sequence: Synthetic polypeptide
QVQLVQSGAEVKKPGASVKVSCKASGYTFTSYDINWVRQATGQGLEWMGWMNPNSGNTGYAQKFQGRVTMTRNTSISTAYMELSSLRSEDTAVYYCARRDGYNYYYYYYGMDVWGQGTTVTVSS

SEQ ID NO: 32227 - protein, 123 aa, synthetic construct
  REGION 1..123: note = Description of Artificial Sequence: Synthetic polypeptide
QVQLVESGGGVVQPGRSLRLSCAASGFTFSSYGMHWVRQAPGKGLEWVAVIWYDGSNKYYADSVKGRFTISRDNSKNTLYLQMNSLRAEDTAVYYCARDIVLMVYAINWFDPWGQGTLVTVSS

SEQ ID NO: 32228 - protein, 119 aa, synthetic construct
  REGION 1..119: note = Description of Artificial Sequence: Synthetic polypeptide
QVQLVQSGAEVKKPGASVKVSCKASGYTFTGYYMHWVRQAPGQGLEWMGWINPNSGGTNYAQKFQGRVTMTRDTSISTAYMELSRLRSDDTAVYYCARGYSYGYYFDYWGQGTLVTVSS

SEQ ID NO: 32229 - protein, 123 aa, synthetic construct
  REGION 1..123: note = Description of Artificial Sequence: Synthetic polypeptide
QVQLVESGGGVVQPGRSLRLSCAASGFTFSSYAMHWVRQAPGKGLEWVAVISYDGSNKYYADSVKGRFTISRDNSKNTLYLQMNSLRAEDTAVYYCARGTTGTYYYYYGMDVWGQGTTVTVSS

SEQ ID NO: 32230 - protein, 125 aa, synthetic construct
  REGION 1..125: note = Description of Artificial Sequence: Synthetic polypeptide
QVQLQESGPGLVKPSQTLSLTCTVSGGSISSGGYYWSWIRQHPGKGLEWIGYIYYSGSTYYNPSLKSRVTISVDTSKNQFSLKLSSVTAADTAVYYCARRDGYNYYYYYYGMDVWGQGTTVTVSS

SEQ ID NO: 32231 - protein, 118 aa, synthetic construct
  REGION 1..118: note = Description of Artificial Sequence: Synthetic polypeptide
EVQLVESGGGLVKPGGSLRLSCAASGFTFSSYSMNWVRQAPGKGLEWVSSISSSSSYIYYADSVKGRFTISRDNAKNSLYLQMNSLRAEDTAVYYCARSIAARYFDYWGQGTLVTVSS

SEQ ID NO: 32232 - protein, 119 aa, synthetic construct
  REGION 1..119: note = Description of Artificial Sequence: Synthetic polypeptide
EVQLVESGGGLVKPGGSLRLSCAASGFTFSSYSMNWVRQAPGKGLEWVSSISSSSSYIYYADSVKGRFTISRDNAKNSLYLQMNSLRAEDTAVYYCARVQLERNWFDPWGQGTLVTVSS

SEQ ID NO: 32233 - protein, 118 aa, synthetic construct
  REGION 1..118: note = Description of Artificial Sequence: Synthetic polypeptide
EVQLLESGGGLVQPGGSLRLSCAASGFTFSSYAMSWVRQAPGKGLEWVSAISGSGGSTYYADSVKGRFTISRDNSKNTLYLQMNSLRAEDTAVYYCAKVQLERYFDYWGQGTLVTVSS

SEQ ID NO: 32234 - protein, 120 aa, synthetic construct
  REGION 1..120: note = Description of Artificial Sequence: Synthetic polypeptide
QLQLQESGPGLVKPSETLSLTCTVSGGSISSSSYYWGWIRQPPGKGLEWIGSIYYSGSTYYNPSLKSRVTISVDTSKNQFSLKLSSVTAADTAVYYCARDYSNYNWFDPWGQGTLVTVSS

SEQ ID NO: 32235 - protein, 124 aa, synthetic construct
  REGION 1..124: note = Description of Artificial Sequence: Synthetic polypeptide
QVQLVQSGAEVKKPGASVKVSCKASGYTFTGYYMHWVRQAPGQGLEWMGWINPNSGGTNYAQKFQGRVTMTRDTSISTAYMELSRLRSDDTAVYYCAREYSSSSYYYYYGMDVWGQGTTVTVSS

SEQ ID NO: 32236 - protein, 119 aa, synthetic construct
  REGION 1..119: note = Description of Artificial Sequence: Synthetic polypeptide
QITLKESGPTLVKPTQTLTLTCTFSGFSLSTSGVGVGWIRQPPGKALEWLALIYWNDDKRYSPSLKSRLTITKDTSKNQVVLTMTNMDPVDTATYYCAHSIAARYFDYWGQGTLVTVSS

SEQ ID NO: 32237 - protein, 124 aa, synthetic construct
  REGION 1..124: note = Description of Artificial Sequence: Synthetic polypeptide
QVQLVQSGAEVKKPGASVKVSCKASGYTFTGYYMHWVRQAPGQGLEWMGWINPNSGGTNYAQKFQGRVTMTRDTSISTAYMELSRLRSDDTAVYYCARGIAVAGYYYYYGMDVWGQGTTVTVSS

SEQ ID NO: 32238 - protein, 119 aa, synthetic construct
  REGION 1..119: note = Description of Artificial Sequence: Synthetic polypeptide
QLQLQESGPGLVKPSETLSLTCTVSGGSISSSSYYWGWIRQPPGKGLEWIGSIYYSGSTYYNPSLKSRVTISVDTSKNQFSLKLSSVTAADTAVYYCARVQLERYFDYWGQGTLVTVSS

SEQ ID NO: 32239 - protein, 124 aa, synthetic construct
  REGION 1..124: note = Description of Artificial Sequence: Synthetic polypeptide
QVQLVQSGAEVKKPGASVKVSCKASGYTFTGYYMHWVRQAPGQGLEWMGWINPNSGGTNYAQKFQGRVTMTRDTSISTAYMELSRLRSDDTAVYYCARYYYDSSGYYYNWFDPWGQGTLVTVSS

SEQ ID NO: 32240 - protein, 123 aa, synthetic construct
  REGION 1..123: note = Description of Artificial Sequence: Synthetic polypeptide
QVQLVQSGAEVKKPGASVKVSCKASGYTFTGYYMHWVRQAPGQGLEWMGWINPNSGGTNYAQKFQGRVTMTRDTSISTAYMELSRLRSDDTAVYYCARYYYDSSGYYYYFDYWGQGTLVTVSS

SEQ ID NO: 32241 - protein, 98 aa, synthetic construct
  REGION 1..98: note = Description of Artificial Sequence: Synthetic polypeptide
QVQLVESGGGVVQPGRSLRLSCAASGFTFSSYGMHWVRQAPGKGLEWVAVIWYDGSNKYYADSVKGRFTISRDNSKNTLYLQMNSLRAEDTAVYYCAR

SEQ ID NO: 32242 - protein, 17 aa, synthetic construct
  REGION 1..17: note = Description of Artificial Sequence: Synthetic peptide
LGYFDYWGQGTLVTVSS

SEQ ID NO: 32243 - protein, 118 aa, synthetic construct
  REGION 1..118: note = Description of Artificial Sequence: Synthetic polypeptide
EVQLVESGGGLVKPGGSLRLSCAASGFTFSSYSMNWVRQAPGKGLEWVSSISSSSSYIYYADSVKGRFTISRDNAKNSLYLQMNSLRAEDTAVYYCARDYSNYYFDYWGQGTLVTVSS

SEQ ID NO: 32244 - protein, 119 aa, synthetic construct
  REGION 1..119: note = Description of Artificial Sequence: Synthetic polypeptide
EVQLLESGGGLVQPGGSLRLSCAASGFTFSSYAMSWVRQAPGKGLEWVSAISGSGGSTYYADSVKGRFTISRDNSKNTLYLQMNSLRAEDTAVYYCAKEYSSSSYFDYWGQGTLVTVSS

SEQ ID NO: 32245 - protein, 116 aa, synthetic construct
  REGION 1..116: note = Description of Artificial Sequence: Synthetic polypeptide
EVQLVESGGGLVKPGGSLRLSCAASGFTFSSYSMNWVRQAPGKGLEWVSSISSSSSYIYYADSVKGRFTISRDNAKNSLYLQMNSLRAEDTAVYYCARLTGYFDYWGQGTLVTVSS

SEQ ID NO: 32246 - protein, 118 aa, synthetic construct
  REGION 1..118: note = Description of Artificial Sequence: Synthetic polypeptide
QVQLVESGGGLVKPGGSLRLSCAASGFTFSDYYMSWIRQAPGKGLEWVSYISSSGSTIYYADSVKGRFTISRDNAKNSLYLQMNSLRAEDTAVYYCARDYSNYYFDYWGQGTLVTVSS

SEQ ID NO: 32247 - protein, 117 aa, synthetic construct
  REGION 1..117: note = Description of Artificial Sequence: Synthetic polypeptide
EVQLLESGGGLVQPGGSLRLSCAASGFTFSSYAMSWVRQAPGKGLEWVSAISGSGGSTYYADSVKGRFTISRDNSKNTLYLQMNSLRAEDTAVYYCAKLTGDAFDIWGQGTMVTVSS

SEQ ID NO: 32248 - protein, 118 aa, synthetic construct
  REGION 1..118: note = Description of Artificial Sequence: Synthetic polypeptide
QVQLQESGPGLVKPSETLSLTCTVSGGSISSYYWSWIRQPPGKGLEWIGYIYYSGSTNYNPSLKSRVTISVDTSKNQFSLKLSSVTAADTAVYYCARGIAAAGYFDYWGQGTLVTVSS

SEQ ID NO: 32249 - protein, 123 aa, synthetic construct
  REGION 1..123: note = Description of Artificial Sequence: Synthetic polypeptide
EVQLLESGGGLVQPGGSLRLSCAASGFTFSSYAMSWVRQAPGKGLEWVSAISGSGGSTYYADSVKGRFTISRDNSKNTLYLQMNSLRAEDTAVYYCAKDYGDYYYYYYGMDVWGQGTTVTVSS

SEQ ID NO: 32250 - protein, 124 aa, synthetic construct
  REGION 1..124: note = Description of Artificial Sequence: Synthetic polypeptide
EVQLVESGGGLVQPGGSLRLSCAASGFTFSSYSMNWVRQAPGKGLEWVSYISSSSSTIYYADSVKGRFTISRDNAKNSLYLQMNSLRDEDTAVYYCARRDGYNYYYYYYGMDVWGQGTTVTVSS

SEQ ID NO: 32251 - protein, 119 aa, synthetic construct
  REGION 1..119: note = Description of Artificial Sequence: Synthetic polypeptide
QVQLVESGGGVVQPGRSLRLSCAASGFTFSSYGMHWVRQAPGKGLEWVAVIWYDGSNKYYADSVKGRFTISRDNSKNTLYLQMNSLRAEDTAVYYCARGIAAAGYFDYWGQGTLVTVSS

SEQ ID NO: 32252 - protein, 120 aa, synthetic construct
  REGION 1..120: note = Description of Artificial Sequence: Synthetic polypeptide
EVQLLESGGGLVQPGGSLRLSCAASGFTFSSYAMSWVRQAPGKGLEWVSAISGSGGSTYYADSVKGRFTISRDNSKNTLYLQMNSLRAEDTAVYYCAKGIAVAGDAFDIWGQGTMVTVSS

SEQ ID NO: 32253 - protein, 119 aa, synthetic construct
  REGION 1..119: note = Description of Artificial Sequence: Synthetic polypeptide
QVQLVESGGGLVKPGGSLRLSCAASGFTFSDYYMSWIRQAPGKGLEWVSYISSSGSTIYYADSVKGRFTISRDNAKNSLYLQMNSLRAEDTAVYYCARSIAARDAFDIWGQGTMVTVSS

SEQ ID NO: 32254 - protein, 118 aa, synthetic construct
  REGION 1..118: note = Description of Artificial Sequence: Synthetic polypeptide
QVQLVESGGGLVKPGGSLRLSCAASGFTFSDYYMSWIRQAPGKGLEWVSYISSSGSTIYYADSVKGRFTISRDNAKNSLYLQMNSLRAEDTAVYYCARSIAARYFDYWGQGTLVTVSS

SEQ ID NO: 32255 - protein, 119 aa, synthetic construct
  REGION 1..119: note = Description of Artificial Sequence: Synthetic polypeptide
EVQLLESGGGLVQPGGSLRLSCAASGFTFSSYAMSWVRQAPGKGLEWVSAISGSGGSTYYADSVKGRFTISRDNSKNTLYLQMNSLRAEDTAVYYCAKGIAAAGYFDYWGQGTLVTVSS

SEQ ID NO: 32256 - protein, 120 aa, synthetic construct
  REGION 1..120: note = Description of Artificial Sequence: Synthetic polypeptide
EVQLLESGGGLVQPGGSLRLSCAASGFTFSSYAMSWVRQAPGKGLEWVSAISGSGGSTYYADSVKGRFTISRDNSKNTLYLQMNSLRAEDTAVYYCAKGIAVAGNWFDPWGQGTLVTVSS

SEQ ID NO: 32257 - protein, 118 aa, synthetic construct
  REGION 1..118: note = Description of Artificial Sequence: Synthetic polypeptide
EVQLVESGGGLVKPGGSLRLSCAASGFTFSSYSMNWVRQAPGKGLEWVSSISSSSSYIYYADSVKGRFTISRDNAKNSLYLQMNSLRAEDTAVYYCARVQLERYFDYWGQGTLVTVSS

SEQ ID NO: 32258 - protein, 128 aa, synthetic construct
  REGION 1..128: note = Description of Artificial Sequence: Synthetic polypeptide
QVQLVQSGAEVKKPGASVKVSCKASGYTFTGYYMHWVRQAPGQGLEWMGWINPNSGGTNYAQKFQGRVTMTRDTSISTAYMELSRLRSDDTAVYYCARGYCSGGSCYSYYYYYGMDVWGQGTTVTVSS

SEQ ID NO: 32259 - protein, 127 aa, synthetic construct
  REGION 1..127: note = Description of Artificial Sequence: Synthetic polypeptide
EVQLVESGGGLVKPGGSLRLSCAASGFTFSSYSMNWVRQAPGKGLEWVSSISSSSSYIYYADSVKGRFTISRDNAKNSLYLQMNSLRAEDTAVYYCARDIVVVVAATYYYYYGMDVWGQGTTVTVSS

SEQ ID NO: 32260 - protein, 119 aa, synthetic construct
  REGION 1..119: note = Description of Artificial Sequence: Synthetic polypeptide
EVQLLESGGGLVQPGGSLRLSCAASGFTFSSYAMSWVRQAPGKGLEWVSAISGSGGSTYYADSVKGRFTISRDNSKNTLYLQMNSLRAEDTAVYYCAKGITGTDAFDIWGQGTMVTVSS

SEQ ID NO: 32261 - protein, 116 aa, synthetic construct
  REGION 1..116: note = Description of Artificial Sequence: Synthetic polypeptide
EVQLLESGGGLVQPGGSLRLSCAASGFTFSSYAMSWVRQAPGKGLEWVSAISGSGGSTYYADSVKGRFTISRDNSKNTLYLQMNSLRAEDTAVYYCAKLTGYFDYWGQGTLVTVSS

SEQ ID NO: 32262 - protein, 98 aa, synthetic construct
  REGION 1..98: note = Description of Artificial Sequence: Synthetic polypeptide
EVQLVESGGGLVKPGGSLRLSCAASGFTFSSYSMNWVRQAPGKGLEWVSSISSSSSYIYYADSVKGRFTISRDNAKNSLYLQMNSLRAEDTAVYYCAR

SEQ ID NO: 32263 - protein, 20 aa, synthetic construct
  REGION 1..20: note = Description of Artificial Sequence: Synthetic peptide
RWLQLYFDYWGQGTLVTVSS

SEQ ID NO: 32264 - protein, 116 aa, synthetic construct
  REGION 1..116: note = Description of Artificial Sequence: Synthetic polypeptide
EVQLLESGGGLVQPGGSLRLSCAASGFTFSSYAMSWVRQAPGKGLEWVSAISGSGGSTYYADSVKGRFTISRDNSKNTLYLQMNSLRAEDTAVYYCAKNWGYFDYWGQGTLVTVSS

SEQ ID NO: 32265 - protein, 123 aa, synthetic construct
  REGION 1..123: note = Description of Artificial Sequence: Synthetic polypeptide
QVQLVESGGGVVQPGRSLRLSCAASGFTFSSYAMHWVRQAPGKGLEWVAVISYDGSNKYYADSVKGRFTISRDNSKNTLYLQMNSLRAEDTAVYYCARSIAARYYYYYGMDVWGQGTTVTVSS

SEQ ID NO: 32266 - protein, 102 aa, synthetic construct
  REGION 1..102: note = Description of Artificial Sequence: Synthetic polypeptide
QVQLVESGGGVVQPGRSLRLSCAASGFTFSSYGMHWVRQAPGKGLEWVAVIWYDGSNKYYADSVKGRFTISRDNSKNTLYLQMNSLRAEDTAVYYCARRILY

SEQ ID NO: 32267 - protein, 20 aa, synthetic construct
  REGION 1..20: note = Description of Artificial Sequence: Synthetic peptide
WCMLYYFDYWGQGTLVTVSS

SEQ ID NO: 32268 - protein, 118 aa, synthetic construct
  REGION 1..118: note = Description of Artificial Sequence: Synthetic polypeptide
EVQLLESGGGLVQPGGSLRLSCAASGFTFSSYAMSWVRQAPGKGLEWVSAISGSGGSTYYADSVKGRFTISRDNSKNTLYLQMNSLRAEDTAVYYCAKTTVVTYFDYWGQGTLVTVSS

SEQ ID NO: 32269 - protein, 120 aa, synthetic construct
  REGION 1..120: note = Description of Artificial Sequence: Synthetic polypeptide
EVQLLESGGGLVQPGGSLRLSCAASGFTFSSYAMSWVRQAPGKGLEWVSAISGSGGSTYYADSVKGRFTISRDNSKNTLYLQMNSLRAEDTAVYYCAKGIVGATDAFDIWGQGTMVTVSS

SEQ ID NO: 32270 - protein, 98 aa, synthetic construct; identical to SEQ ID NO: 32241
  REGION 1..98: note = Description of Artificial Sequence: Synthetic polypeptide

SEQ ID NO: 32271 - protein, 20 aa, synthetic construct
  REGION 1..20: note = Description of Artificial Sequence: Synthetic peptide
RWLQLYFDYWGQGTLVTVSS

SEQ ID NO: 32272 - protein, 118 aa, synthetic construct
  REGION 1..118: note = Description of Artificial Sequence: Synthetic polypeptide
EVQLLESGGGLVQPGGSLRLSCAASGFTFSSYAMSWVRQAPGKGLEWVSAISGSGGSTYYADSVKGRFTISRDNSKNTLYLQMNSLRAEDTAVYYCAKDYGDYYFDYWGQGTLVTVSS

SEQ ID NO: 32273 - protein, 118 aa, synthetic construct
  REGION 1..118: note = Description of Artificial Sequence: Synthetic polypeptide
EVQLVESGGGLVKPGGSLRLSCAASGFTFSSYSMNWVRQAPGKGLEWVSSISSSSSYIYYADSVKGRFTISRDNAKNSLYLQMNSLRAEDTAVYYCARGTTGTYFDYWGQGTLVTVSS

SEQ ID NO: 32274 - protein, 116 aa, synthetic construct
  REGION 1..116: note = Description of Artificial Sequence: Synthetic polypeptide
QVQLVESGGGVVQPGRSLRLSCAASGFTFSSYGMHWVRQAPGKGLEWVAVIWYDGSNKYYADSVKGRFTISRDNSKNTLYLQMNSLRAEDTAVYYCARNWGYFDYWGQGTLVTVSS

SEQ ID NO: 32275 - protein, 99 aa, synthetic construct
  REGION 1..99: note = Description of Artificial Sequence: Synthetic polypeptide
QVQLVESGGGVVQPGRSLRLSCAASGFTFSSYGMHWVRQAPGKGLEWVAVIWYDGSNKYYADSVKGRFTISRDNSKNTLYLQMNSLRAEDTAVYYCARV

SEQ ID NO: 32276 - protein, 18 aa, synthetic construct
  REGION 1..18: note = Description of Artificial Sequence: Synthetic peptide
QLVYFDYWGQGTLVTVSS

SEQ ID NO: 32277 - protein, 123 aa, synthetic construct
  REGION 1..123: note = Description of Artificial Sequence: Synthetic polypeptide
QVQLVQSGAEVKKPGASVKVSCKASGYTFTSYYMHWVRQAPGQGLEWMGIINPSGGSTSYAQKFQGRVTMTRDTSTSTVYMELSSLRSEDTAVYYCARDYGDYYYYYYGMDVWGQGTTVTVSS

SEQ ID NO: 32278 - protein, 119 aa, synthetic construct
  REGION 1..119: note = Description of Artificial Sequence: Synthetic polypeptide
QVQLVESGGGVVQPGRSLRLSCAASGFTFSSYAMHWVRQAPGKGLEWVAVISYDGSNKYYADSVKGRFTISRDNSKNTLYLQMNSLRAEDTAVYYCARDYGDYDAFDIWGQGTMVTVSS

SEQ ID NO: 32279 - protein, 120 aa, synthetic construct
  REGION 1..120: note = Description of Artificial Sequence: Synthetic polypeptide
QVQLVQSGAEVKKPGASVKVSCKASGYTFTGYYMHWVRQAPGQGLEWMGWINPNSGGTNYAQKFQGRVTMTRDTSISTAYMELSRLRSDDTAVYYCARGTTGTYWYFDLWGRGTLVTVSS

SEQ ID NO: 32280 - protein, 119 aa, synthetic construct
  REGION 1..119: note = Description of Artificial Sequence: Synthetic polypeptide
QVQLVQSGAEVKKPGASVKVSCKASGYTFTGYYMHWVRQAPGQGLEWMGWINPNSGGTNYAQKFQGRVTMTRDTSISTAYMELSRLRSDDTAVYYCARVEMATIYFDYWGQGTLVTVSS

SEQ ID NO: 32281 - protein, 118 aa, synthetic construct
  REGION 1..118: note = Description of Artificial Sequence: Synthetic polypeptide
QVQLVESGGGVVQPGRSLRLSCAASGFTFSSYGMHWVRQAPGKGLEWVAVIWYDGSNKYYADSVKGRFTISRDNSKNTLYLQMNSLRAEDTAVYYCARVQLERYFDYWGQGTLVTVSS

SEQ ID NO: 32282 - protein, 124 aa, synthetic construct
  REGION 1..124: note = Description of Artificial Sequence: Synthetic polypeptide
QVQLVQSGAEVKKPGASVKVSCKASGYTFTGYYMHWVRQAPGQGLEWMGWINPNSGGTNYAQKFQGRVTMTRDTSISTAYMELSRLRSDDTAVYYCARGYSYGYYYYYYGMDVWGQGTTVTVSS

SEQ ID NO: 32283 - protein, 121 aa, synthetic construct
  REGION 1..121: note = Description of Artificial Sequence: Synthetic polypeptide
QVQLQESGPGLVKPSQTLSLTCTVSGGSISSGDYYWSWIRQPPGKGLEWIGYIYYSGSTYYNPSLKSRVTISVDTSKNQFSLKLSSVTAADTAVYYCARGYSGYDYYFDYWGQGTLVTVSS

SEQ ID NO: 32284 - protein, 122 aa, synthetic construct
  REGION 1..122: note = Description of Artificial Sequence: Synthetic polypeptide
EVQLLESGGGLVQPGGSLRLSCAASGFTFSSYAMSWVRQAPGKGLEWVSAISGSGGSTYYADSVKGRFTISRDNSKNTLYLQMNSLRAEDTAVYYCAKITMIVVVITYFDYWGQGTLVTVSS

SEQ ID NO: 32285 - protein, 116 aa, synthetic construct
  REGION 1..116: note = Description of Artificial Sequence: Synthetic polypeptide
QVQLQESGPGLVKPSETLSLTCTVSGGSISSYYWSWIRQPPGKGLEWIGYIYYSGSTNYNPSLKSRVTISVDTSKNQFSLKLSSVTAADTAVYYCARTTVTYFDYWGQGTLVTVSS

SEQ ID NO: 32286 - protein, 120 aa, synthetic construct
  REGION 1..120: note = Description of Artificial Sequence: Synthetic polypeptide
EVQLLESGGGLVQPGGSLRLSCAASGFTFSSYAMSWVRQAPGKGLEWVSAISGSGGSTYYADSVKGRFTISRDNSKNTLYLQMNSLRAEDTAVYYCAKGYSYGYDAFDIWGQGTMVTVSS

SEQ ID NO: 32287 - protein, 119 aa, synthetic construct
  REGION 1..119: note = Description of Artificial Sequence: Synthetic polypeptide
QVQLVESGGGVVQPGRSLRLSCAASGFTFSSYGMHWVRQAPGKGLEWVAVIWYDGSNKYYADSVKGRFTISRDNSKNTLYLQMNSLRAEDTAVYYCARVDTAMVYFDYWGQGTLVTVSS

SEQ ID NO: 32288 - protein, 118 aa, synthetic construct
  REGION 1..118: note = Description of Artificial Sequence: Synthetic polypeptide
QVQLVESGGGVVQPGRSLRLSCAASGFTFSSYGMHWVRQAPGKGLEWVAVIWYDGSNKYYADSVKGRFTISRDNSKNTLYLQMNSLRAEDTAVYYCARYNWNDYFDYWGQGTLVTVSS

SEQ ID NO: 32289 - protein, 121 aa, synthetic construct
  REGION 1..121: note = Description of Artificial Sequence: Synthetic polypeptide
QLQLQESGPGLVKPSETLSLTCTVSGGSISSSSYYWGWIRQPPGKGLEWIGSIYYSGSTYYNPSLKSRVTISVDTSKNQFSLKLSSVTAADTAVYYCARGYSGYDYYFDYWGQGTLVTVSS

SEQ ID NO: 32290 - protein, 116 aa, synthetic construct
  REGION 1..116: note = Description of Artificial Sequence: Synthetic polypeptide
QVQLVQSGAEVKKPGASVKVSCKASGYTFTGYYMHWVRQAPGQGLEWMGWINPNSGGTNYAQKFQGRVTMTRDTSISTAYMELSRLRSDDTAVYYCARLTGYFDYWGQGTLVTVSS

SEQ ID NO: 32291 - protein, 117 aa, synthetic construct
  REGION 1..117: note = Description of Artificial Sequence: Synthetic polypeptide
EVQLLESGGGLVQPGGSLRLSCAASGFTFSSYAMSWVRQAPGKGLEWVSAISGSGGSTYYADSVKGRFTISRDNSKNTLYLQMNSLRAEDTAVYYCAKTTVTYFDYWGQGTLVTVSS

SEQ ID NO: 32292 - protein, 118 aa, synthetic construct
  REGION 1..118: note = Description of Artificial Sequence: Synthetic polypeptide
EVQLLESGGGLVQPGGSLRLSCAASGFTFSSYAMSWVRQAPGKGLEWVSAISGSGGSTYYADSVKGRFTISRDNSKNTLYLQMNSLRAEDTAVYYCAKYNWNDYFDYWGQGTLVTVSS

SEQ ID NO: 32293 - protein, 122 aa, synthetic construct
  REGION 1..122: note = Description of Artificial Sequence: Synthetic polypeptide
EVQLLESGGGLVQPGGSLRLSCAASGFTFSSYAMSWVRQAPGKGLEWVSAISGSGGSTYYADSVKGRFTISRDNSKNTLYLQMNSLRAEDTAVYYCAKITIFGVVIIYFDYWGQGTLVTVSS

SEQ ID NO: 32294 - protein, 124 aa, synthetic construct
  REGION 1..124: note = Description of Artificial Sequence: Synthetic polypeptide
EVQLLESGGGLVQPGGSLRLSCAASGFTFSSYAMSWVRQAPGKGLEWVSAISGSGGSTYYADSVKGRFTISRDNSKNTLYLQMNSLRAEDTAVYYCAKITMIVVVITAEYFQHWGQGTLVTVSS

SEQ ID NO: 32295 - protein, 122 aa, synthetic construct
  REGION 1..122: note = Description of Artificial Sequence: Synthetic polypeptide
QVQLVESGGGVVQPGRSLRLSCAASGFTFSSYGMHWVRQAPGKGLEWVAVIWYDGSNKYYADSVKGRFTISRDNSKNTLYLQMNSLRAEDTAVYYCARDIVVVVAATYFDYWGQGTLVTVSS

SEQ ID NO: 32296 - protein, 118 aa, synthetic construct
  REGION 1..118: note = Description of Artificial Sequence: Synthetic polypeptide
QVQLVQSGAEVKKPGASVKVSCKASGYTFTGYYMHWVRQAPGQGLEWMGWINPNSGGTNYAQKFQGRVTMTRDTSISTAYMELSRLRSDDTAVYYCARDYGDYYFDYWGQGTLVTVSS

SEQ ID NO: 32297 - protein, 127 aa, synthetic construct
  REGION 1..127: note = Description of Artificial Sequence: Synthetic polypeptide
QVQLVESGGGVVQPGRSLRLSCAASGFTFSSYGMHWVRQAPGKGLEWVAVIWYDGSNKYYADSVKGRFTISRDNSKNTLYLQMNSLRAEDTAVYYCARITMIVVVITYYYYYGMDVWGQGTTVTVSS

SEQ ID NO: 32298 - protein, 120 aa, synthetic construct
  REGION 1..120: note = Description of Artificial Sequence: Synthetic polypeptide
QLQLQESGPGLVKPSETLSLTCTVSGGSISSSSYYWGWIRQPPGKGLEWIGSIYYSGSTYYNPSLKSRVTISVDTSKNQFSLKLSSVTAADTAVYYCARYSGSYYYFDYWGQGTLVTVSS

SEQ ID NO: 32299 - protein, 116 aa, synthetic construct
  REGION 1..116: note = Description of Artificial Sequence: Synthetic polypeptide
EVQLVESGGGLVQPGGSLRLSCAASGFTFSSYSMNWVRQAPGKGLEWVSYISSSSSTIYYADSVKGRFTISRDNAKNSLYLQMNSLRDEDTAVYYCARNWGYFDYWGQGTLVTVSS

SEQ ID NO: 32300 - protein, 119 aa, synthetic construct
  REGION 1..119: note = Description of Artificial Sequence: Synthetic polypeptide
QVQLVESGGGVVQPGRSLRLSCAASGFTFSSYGMHWVRQAPGKGLEWVAVIWYDGSNKYYADSVKGRFTISRDNSKNTLYLQMNSLRAEDTAVYYCARYSGSYYYFDYWGQGTLVTVSS

SEQ ID NO: 32301 - protein, 119 aa, synthetic construct
  REGION 1..119: note = Description of Artificial Sequence: Synthetic polypeptide
QVQLVQSGAEVKKPGASVKVSCKASGYTFTGYYMHWVRQAPGQGLEWMGWINPNSGGTNYAQKFQGRVTMTRDTSISTAYMELSRLRSDDTAVYYCARGIAVAGYFDYWGQGTLVTVSS

SEQ ID NO: 32302 - protein, 118 aa, synthetic construct
  REGION 1..118: note = Description of Artificial Sequence: Synthetic polypeptide
QVQLVESGGGVVQPGRSLRLSCAASGFTFSSYGMHWVRQAPGKGLEWVAVIWYDGSNKYYADSVKGRFTISRDNSKNTLYLQMNSLRAEDTAVYYCARDYSNYYFDYWGQGTLVTVSS

SEQ ID NO: 32303 - protein, 117 aa, synthetic construct
  REGION 1..117: note = Description of Artificial Sequence: Synthetic polypeptide
QVQLQESGPGLVKPSETLSLTCTVSGGSISSYYWSWIRQPPGKGLEWIGYIYYSGSTNYNPSLKSRVTISVDTSKNQFSLKLSSVTAADTAVYYCARDYSNYYFDYWGQGTLVTVSS

SEQ ID NO: 32304 - protein, 98 aa, synthetic construct; identical to SEQ ID NO: 32241
  REGION 1..98: note = Description of Artificial Sequence: Synthetic polypeptide

SEQ ID NO: 32305 - protein, 19 aa, synthetic construct
  REGION 1..19: note = Description of Artificial Sequence: Synthetic peptide
LGAEYFQHWGQGTLVTVSS

SEQ ID NO: 32306 - protein, 124 aa, synthetic construct
  REGION 1..124: note = Description of Artificial Sequence: Synthetic polypeptide
EVQLLESGGGLVQPGGSLRLSCAASGFTFSSYAMSWVRQAPGKGLEWVSAISGSGGSTYYADSVKGRFTISRDNSKNTLYLQMNSLRAEDTAVYYCAKYYYDSSGYYYDAFDIWGQGTMVTVSS

SEQ ID NO: 32307 - protein, 117 aa, synthetic construct
  REGION 1..117: note = Description of Artificial Sequence: Synthetic polypeptide
EVQLVESGGGLVKPGGSLRLSCAASGFTFSSYSMNWVRQAPGKGLEWVSSISSSSSYIYYADSVKGRFTISRDNAKNSLYLQMNSLRAEDTAVYYCARTTVTYFDYWGQGTLVTVSS

SEQ ID NO: 32308 - protein, 118 aa, synthetic construct
  REGION 1..118: note = Description of Artificial Sequence: Synthetic polypeptide
EVQLVESGGGLVKPGGSLRLSCAASGFTFSSYSMNWVRQAPGKGLEWVSSISSSSSYIYYADSVKGRFTISRDNAKNSLYLQMNSLRAEDTAVYYCARTTVTDAFDIWGQGTMVTVSS

SEQ ID NO: 32309 - protein, 118 aa, synthetic construct
  REGION 1..118: note = Description of Artificial Sequence: Synthetic polypeptide
QVQLVESGGGVVQPGRSLRLSCAASGFTFSSYGMHWVRQAPGKGLEWVAVIWYDGSNKYYADSVKGRFTISRDNSKNTLYLQMNSLRAEDTAVYYCARSIAARYFDYWGQGTLVTVSS

SEQ ID NO: 32310 - protein, 119 aa, synthetic construct
  REGION 1..119: note = Description of Artificial Sequence: Synthetic polypeptide
EVQLVESGGGLVKPGGSLRLSCAASGFTFSSYSMNWVRQAPGKGLEWVSSISSSSSYIYYADSVKGRFTISRDNAKNSLYLQMNSLRAEDTAVYYCARYSGSYYYFDYWGQGTLVTVSS

SEQ ID NO: 32311 - protein, 122 aa, synthetic construct
  REGION 1..122: note = Description of Artificial Sequence: Synthetic polypeptide
QVQLVESGGGVVQPGRSLRLSCAASGFTFSSYAMHWVRQAPGKGLEWVAVISYDGSNKYYADSVKGRFTISRDNSKNTLYLQMNSLRAEDTAVYYCARDIVVVVAATYFDYWGQGTLVTVSS

SEQ ID NO: 32312 - protein, 107 aa, synthetic construct
  REGION 1..107: note = Description of Artificial Sequence: Synthetic polypeptide
QVQLVESGGGVVQPGRSLRLSCAASGFTFSSYGMHWVRQAPGKGLEWVAVIWYDGSNKYYADSVKGRFTISRDNSKNTLYLQMNSLRAEDTAVYYCARVLLWFGELL

SEQ ID NO: 32313 - protein, 15 aa, synthetic construct
  REGION 1..15: note = Description of Artificial Sequence: Synthetic peptide
YFDYWGQGTLVTVSS

SEQ ID NO: 32314 - protein, 120 aa, synthetic construct
  REGION 1..120: note = Description of Artificial Sequence: Synthetic polypeptide
EVQLLESGGGLVQPGGSLRLSCAASGFTFSSYAMSWVRQAPGKGLEWVSAISGSGGSTYYADSVKGRFTISRDNSKNTLYLQMNSLRAEDTAVYYCAKGYSSSWYYFDYWGQGTLVTVSS

SEQ ID NO: 32315 - protein, 117 aa, synthetic construct
  REGION 1..117: note = Description of Artificial Sequence: Synthetic polypeptide
QVQLQQWGAGLLKPSETLSLTCAVYGGSFSGYYWSWIRQPPGKGLEWIGEINHSGSTNYNPSLKSRVTISVDTSKNQFSLKLSSVTAADTAVYYCARDYGDYYFDYWGQGTLVTVSS

SEQ ID NO: 32316 - protein, 124 aa, synthetic construct
  REGION 1..124: note = Description of Artificial Sequence: Synthetic polypeptide
QVQLVESGGGVVQPGRSLRLSCAASGFTFSSYGMHWVRQAPGKGLEWVAVIWYDGSNKYYADSVKGRFTISRDNSKNTLYLQMNSLRAEDTAVYYCARDIVVVVAATAEYFQHWGQGTLVTVSS

SEQ ID NO: 32317 - protein, 118 aa, synthetic construct
  REGION 1..118: note = Description of Artificial Sequence: Synthetic polypeptide
QLQLQESGPGLVKPSETLSLTCTVSGGSISSSSYYWGWIRQPPGKGLEWIGSIYYSGSTYYNPSLKSRVTISVDTSKNQFSLKLSSVTAADTAVYYCARLTGNWFDPWGQGTLVTVSS

SEQ ID NO: 32318 - protein, 120 aa, synthetic construct
  REGION 1..120: note = Description of Artificial Sequence: Synthetic polypeptide
EVQLVESGGGLVKPGGSLRLSCAASGFTFSNAWMSWVRQAPGKGLEWVGRIKSKTDGGTTDYAAPVKGRFTISRDDSKNTLYLQMNSLKTEDTAVYYCTTVQLERYFDYWGQGTLVTVSS

SEQ ID NO: 32319 - protein, 119 aa, synthetic construct
  REGION 1..119: note = Description of Artificial Sequence: Synthetic polypeptide
QVQLVESGGGVVQPGRSLRLSCAASGFTFSSYGMHWVRQAPGKGLEWVAVIWYDGSNKYYADSVKGRFTISRDNSKNTLYLQMNSLRAEDTAVYYCARGYSYGYYFDYWGQGTLVTVSS

SEQ ID NO: 32320 - protein, 127 aa, synthetic construct
  REGION 1..127: note = Description of Artificial Sequence: Synthetic polypeptide
QVQLQQWGAGLLKPSETLSLTCAVYGGSFSGYYWSWIRQPPGKGLEWIGEINHSGSTNYNPSLKSRVTISVDTSKNQFSLKLSSVTAADTAVYYCARYYYGSGSYYNYYYYYGMDVWGQGTTVTVSS

SEQ ID NO: 32321 - protein, 106 aa, synthetic construct
  REGION 1..106: note = Description of Artificial Sequence: Synthetic polypeptide
EVQLVESGGGLVQPGGSLRLSCAASGFTFSSYDMHWVRQATGKGLEWVSAIGTAGDTYYPGSVKGRFTISRENAKNSLYLQMNSLRAGDTAVYYCARVLRYFDWLL

SEQ ID NO: 32322 - protein, 20 aa, synthetic construct
  REGION 1..20: note = Description of Artificial Sequence: Synthetic peptide
YYYYYGMDVWGQGTTVTVSS

SEQ ID NO: 32323 - protein, 119 aa, synthetic construct
  REGION 1..119: note = Description of Artificial Sequence: Synthetic polypeptide
QVQLVQSGAEVKKPGASVKVSCKASGYTFTSYDINWVRQATGQGLEWMGWMNPNSGNTGYAQKFQGRVTMTRNTSISTAYMELSSLRSEDTAVYYCARYSGSYYYFDYWGQGTLVTVSS

SEQ ID NO: 32324 - protein, 123 aa, synthetic construct
  REGION 1..123: note = Description of Artificial Sequence: Synthetic polypeptide
QVQLVQSGAEVKKPGASVKVSCKASGYTFTSYDINWVRQATGQGLEWMGWMNPNSGNTGYAQKFQGRVTMTRNTSISTAYMELSSLRSEDTAVYYCARGTTGTYYYYYGMDVWGQGTTVTVSS

SEQ ID NO: 32325 - protein, 128 aa, synthetic construct
  REGION 1..128: note = Description of Artificial Sequence: Synthetic polypeptide
QVQLVQSGAEVKKPGASVKVSCKASGYTFTSYDINWVRQATGQGLEWMGWMNPNSGNTGYAQKFQGRVTMTRNTSISTAYMELSSLRSEDTAVYYCARYYYDSSGYYYYYYYYGMDVWGQGTTVTVSS

SEQ ID NO: 32326 - protein, 123 aa, synthetic construct
  REGION 1..123: note = Description of Artificial Sequence: Synthetic polypeptide
QVQLVESGGGVVQPGRSLRLSCAASGFTFSSYGMHWVRQAPGKGLEWVAVIWYDGSNKYYADSVKGRFTISRDNSKNTLYLQMNSLRAEDTAVYYCARDIVVVVAATDAFDIWGQGTMVTVSS

SEQ ID NO: 32327 - protein, 117 aa, synthetic construct
  REGION 1..117: note = Description of Artificial Sequence: Synthetic polypeptide
QLQLQESGPGLVKPSETLSLTCTVSGGSISSSSYYWGWIRQPPGKGLEWIGSIYYSGSTYYNPSLKSRVTISVDTSKNQFSLKLSSVTAADTAVYYCARLTGYFDYWGQGTLVTVSS

SEQ ID NO: 32328 - protein, 119 aa, synthetic construct
  REGION 1..119: note = Description of Artificial Sequence: Synthetic polypeptide
EVQLLESGGGLVQPGGSLRLSCAASGFTFSSYAMSWVRQAPGKGLEWVSAISGSGGSTYYADSVKGRFTISRDNSKNTLYLQMNSLRAEDTAVYYCAKDYGDYNWFDPWGQGTLVTVSS

SEQ ID NO: 32329 - protein, 127 aa, synthetic construct
  REGION 1..127: note = Description of Artificial Sequence: Synthetic polypeptide
QVQLVESGGGVVQPGRSLRLSCAASGFTFSSYGMHWVRQAPGKGLEWVAVISYDGSNKYYADSVKGRFTISRDNSKNTLYLQMNSLRAEDTAVYYCAKITMIVVVITYYYYYGMDVWGQGTTVTVSS

SEQ ID NO: 32330 - protein, 120 aa, synthetic construct
  REGION 1..120: note = Description of Artificial Sequence: Synthetic polypeptide
QVQLQESGPGLVKPSQTLSLTCTVSGGSISSGGYYWSWIRQHPGKGLEWIGYIYYSGSTYYNPSLKSRVTISVDTSKNQFSLKLSSVTAADTAVYYCARGTTGTDAFDIWGQGTMVTVSS

SEQ ID NO: 32331 - protein, 120 aa, synthetic construct
  REGION 1..120: note = Description of Artificial Sequence: Synthetic polypeptide
EVQLVESGGGLVKPGGSLRLSCAASGFTFSSYSMNWVRQAPGKGLEWVSSISSSSSYIYYADSVKGRFTISRDNAKNSLYLQMNSLRAEDTAVYYCARGYSSSWYYFDYWGQGTLVTVSS

SEQ ID NO: 32332 - protein, 125 aa, synthetic construct
  REGION 1..125: note = Description of Artificial Sequence: Synthetic polypeptide
QVQLQESGPGLVKPSQTLSLTCTVSGGSISSGDYYWSWIRQPPGKGLEWIGYIYYSGSTYYNPSLKSRVTISVDTSKNQFSLKLSSVTAADTAVYYCARGYSYGYYYYYYGMDVWGQGTTVTVSS

SEQ ID NO: 32333 - protein, 121 aa, synthetic construct
  REGION 1..121: note = Description of Artificial Sequence: Synthetic polypeptide
QVQLQESGPGLVKPSQTLSLTCTVSGGSISSGGYYWSWIRQHPGKGLEWIGYIYYSGSTYYNPSLKSRVTISVDTSKNQFSLKLSSVTAADTAVYYCARRDGYNYDAFDIWGQGTMVTVSS

SEQ ID NO: 32334 - protein, 118 aa, synthetic construct
  REGION 1..118: note = Description of Artificial Sequence: Synthetic polypeptide
EVQLVESGGGLVQPGGSLRLSCAASGFTFSSYSMNWVRQAPGKGLEWVSYISSSSSTIYYADSVKGRFTISRDNAKNSLYLQMNSLRDEDTAVYYCARDYSNYYFDYWGQGTLVTVSS

SEQ ID NO: 32335 - protein, 122 aa, synthetic construct
  REGION 1..122: note = Description of Artificial Sequence: Synthetic polypeptide
QVQLVQSGAEVKKPGASVKVSCKASGYTFTGYYMHWVRQAPGQGLEWMGWINPNSGGTNYAQKFQGRVTMTRDTSISTAYMELSRLRSDDTAVYYCARDIVVVVAATYFDYWGQGTLVTVSS

SEQ ID NO: 32336 - protein, 126 aa, synthetic construct
  REGION 1..126: note = Description of Artificial Sequence: Synthetic polypeptide
QVQLQESGPGLVKPSQTLSLTCTVSGGSISSGGYYWSWIRQHPGKGLEWIGYIYYSGSTYYNPSLKSRVTISVDTSKNQFSLKLSSVTAADTAVYYCARGYSGYDYYYYYYGMDVWGQGTTVTVSS

SEQ ID NO: 32337 - protein, 118 aa, synthetic construct
  REGION 1..118: note = Description of Artificial Sequence: Synthetic polypeptide
EVQLVESGGGLVQPGGSLRLSCAASGFTFSSYSMNWVRQAPGKGLEWVSYISSSSSTIYYADSVKGRFTISRDNAKNSLYLQMNSLRDEDTAVYYCARSIAARYFDYWGQGTLVTVSS

SEQ ID NO: 32338 - protein, 120 aa, synthetic construct
  REGION 1..120: note = Description of Artificial Sequence: Synthetic polypeptide
QVQLVESGGGVVQPGRSLRLSCAASGFTFSSYAMHWVRQAPGKGLEWVAVISYDGSNKYYADSVKGRFTISRDNSKNTLYLQMNSLRAEDTAVYYCARWIQLWLNWFDPWGQGTLVTVSS

SEQ ID NO: 32339 - protein, 123 aa, synthetic construct
  REGION 1..123: note = Description of Artificial Sequence: Synthetic polypeptide
QVQLVESGGGVVQPGRSLRLSCAASGFTFSSYGMHWVRQAPGKGLEWVAVIWYDGSNKYYADSVKGRFTISRDNSKNTLYLQMNSLRAEDTAVYYCARYYYDSSGYYYYFDYWGQGTLVTVSS

SEQ ID NO: 32340 - protein, 99 aa, synthetic construct
  REGION 1..99: note = Description of Artificial Sequence: Synthetic polypeptide
EVQLLESGGGLVQPGGSLRLSCAASGFTFSSYAMSWVRQAPGKGLEWVSAISGSGGSTYYADSVKGRFTISRDNSKNTLYLQMNSLRAEDTAVYYCAKV

SEQ ID NO: 32341 - protein, 19 aa, synthetic construct
  REGION 1..19: note = Description of Artificial Sequence: Synthetic peptide
WELLYFDYWGQGTLVTVSS

SEQ ID NO: 32342 - protein, 119 aa, synthetic construct
  REGION 1..119: note = Description of Artificial Sequence: Synthetic polypeptide
EVQLLESGGGLVQPGGSLRLSCAASGFTFSSYAMSWVRQAPGKGLEWVSAISGSGGSTYYADSVKGRFTISRDNSKNTLYLQMNSLRAEDTAVYYCAKGYSYGYYFDYWGQGTLVTVSS

SEQ ID NO: 32343 - protein, 121 aa, synthetic construct
  REGION 1..121: note = Description of Artificial Sequence: Synthetic polypeptide
EVQLLESGGGLVQPGGSLRLSCAASGFTFSSYAMSWVRQAPGKGLEWVSAISGSGGSTYYADSVKGRFTISRDNSKNTLYLQMNSLRAEDTAVYYCAKGYSSGWYDAFDIWGQGTMVTVSS

SEQ ID NO: 32344 - protein, 122 aa, synthetic construct
  REGION 1..122: note = Description of Artificial Sequence: Synthetic polypeptide
QLQLQESGPGLVKPSETLSLTCTVSGGSISSSSYYWGWIRQPPGKGLEWIGSIYYSGSTYYNPSLKSRVTISVDTSKNQFSLKLSSVTAADTAVYYCARHIVVVTAIYFDYWGQGTLVTVSS

SEQ ID NO: 32345 - protein, 128 aa, synthetic construct
  REGION 1..128: note = Description of Artificial Sequence: Synthetic polypeptide
QVQLVESGGGVVQPGRSLRLSCAASGFTFSSYGMHWVRQAPGKGLEWVAVIWYDGSNKYYADSVKGRFTISRDNSKNTLYLQMNSLRAEDTAVYYCARYYYGSGSYYNYYYYYGMDVWGQGTTVTVSS

SEQ ID NO: 32346 - protein, 123 aa, synthetic construct
  REGION 1..123: note = Description of Artificial Sequence: Synthetic polypeptide
EVQLLESGGGLVQPGGSLRLSCAASGFTFSSYAMSWVRQAPGKGLEWVSAISGSGGSTYYADSVKGRFTISRDNSKNTLYLQMNSLRAEDTAVYYCAKGTTGTYYYYYGMDVWGQGTTVTVSS

SEQ ID NO: 32347 - protein, 123 aa, synthetic construct
  REGION 1..123: note = Description of Artificial Sequence: Synthetic polypeptide
EVQLVESGGGLVKPGGSLRLSCAASGFTFSSYSMNWVRQAPGKGLEWVSSISSSSSYIYYADSVKGRFTISRDNAKNSLYLQMNSLRAEDTAVYYCARGTTGTYYYYYGMDVWGQGTTVTVSS

SEQ ID NO: 32348 - protein, 118 aa, synthetic construct
  REGION 1..118: note = Description of Artificial Sequence: Synthetic polypeptide
QVQLVQSGAEVKKPGASVKVSCKASGYTFTSYDINWVRQATGQGLEWMGWMNPNSGNTGYAQKFQGRVTMTRNTSISTAYMELSSLRSEDTAVYYCARGTTGTYFDYWGQGTLVTVSS

SEQ ID NO: 32349 - protein, 124 aa, synthetic construct
  REGION 1..124: note = Description of Artificial Sequence: Synthetic polypeptide
QVQLVESGGGVVQPGRSLRLSCAASGFTFSSYAMHWVRQAPGKGLEWVAVISYDGSNKYYADSVKGRFTISRDNSKNTLYLQMNSLRAEDTAVYYCARYSGSYYYYYYYGMDVWGQGTTVTVSS

SEQ ID NO: 32350 - protein, 121 aa, synthetic construct
  REGION 1..121: note = Description of Artificial Sequence: Synthetic polypeptide
EVQLLESGGGLVQPGGSLRLSCAASGFTFSSYAMSWVRQAPGKGLEWVSAISGSGGSTYYADSVKGRFTISRDNSKNTLYLQMNSLRAEDTAVYYCAKHIVVVTAIYFDYWGQGTLVTVSS

SEQ ID NO: 32351 - protein, 120 aa, synthetic construct
  REGION 1..120: note = Description of Artificial Sequence: Synthetic polypeptide
QLQLQESGPGLVKPSETLSLTCTVSGGSISSSSYYWGWIRQPPGKGLEWIGSIYYSGSTYYNPSLKSRVTISVDTSKNQFSLKLSSVTAADTAVYYCARYNWNDNWFDPWGQGTLVTVSS

SEQ ID NO: 32352 - protein, 123 aa, synthetic construct
  REGION 1..123: note = Description of Artificial Sequence: Synthetic polypeptide
QVQLVESGGGVVQPGRSLRLSCAASGFTFSSYGMHWVRQAPGKGLEWVAVIWYDGSNKYYADSVKGRFTISRDNSKNTLYLQMNSLRAEDTAVYYCARVQLERYYYYYGMDVWGQGTTVTVSS

SEQ ID NO: 32353 - protein, 115 aa, synthetic construct
  REGION 1..115: note = Description of Artificial Sequence: Synthetic polypeptide
EVQLVETGGGLIQPGGSLRLSCAASGFTVSSNYMSWVRQAPGKGLEWVSVIYSGGSTYYADSVKGRFTISRDNSKNTLYLQMNSLRAEDTAVYYCARNWGYFDYWGQGTLVTVSS

SEQ ID NO: 32354 - protein, 124 aa, synthetic construct
  REGION 1..124: note = Description of Artificial Sequence: Synthetic polypeptide
QVQLVESGGGVVQPGRSLRLSCAASGFTFSSYAMHWVRQAPGKGLEWVAVISYDGSNKYYADSVKGRFTISRDNSKNTLYLQMNSLRAEDTAVYYCAREYSSSSYYYYYGMDVWGQGTTVTVSS

SEQ ID NO: 32355 - protein, 124 aa, synthetic construct
  REGION 1..124: note = Description of Artificial Sequence: Synthetic polypeptide
QVQLVESGGGVVQPGRSLRLSCAASGFTFSSYAMHWVRQAPGKGLEWVAVISYDGSNKYYADSVKGRFTISRDNSKNTLYLQMNSLRAEDTAVYYCARGIAAAGYYYYYGMDVWGQGTTVTVSS

SEQ ID NO: 32356 - protein, 124 aa, synthetic construct
  REGION 1..124: note = Description of Artificial Sequence: Synthetic polypeptide
QVQLVESGGGVVQPGRSLRLSCAASGFTFSSYGMHWVRQAPGKGLEWVAVIWYDGSNKYYADSVKGRFTISRDNSKNTLYLQMNSLRAEDTAVYYCARVDTAMVYYYYYGMDVWGQGTTVTVSS

SEQ ID NO: 32357 - protein, 121 aa, synthetic construct
  REGION 1..121: note = Description of Artificial Sequence: Synthetic polypeptide
EVQLVESGGGLVKPGGSLRLSCAASGFTFSSYSMNWVRQAPGKGLEWVSSISSSSSYIYYADSVKGRFTISRDNAKNSLYLQMNSLRAEDTAVYYCARLTGYYYYYGMDVWGQGTTVTVSS

SEQ ID NO: 32358 - protein, 98 aa, synthetic construct; identical to SEQ ID NO: 32262
  REGION 1..98: note = Description of Artificial Sequence: Synthetic polypeptide

SEQ ID NO: 32359 - protein, 25 aa, synthetic construct
  REGION 1..25: note = Description of Artificial Sequence: Synthetic peptide
RWLQLYYYYYGMDVWGQGTTVTVSS

SEQ ID NO: 32360 - protein, 123 aa, synthetic construct
  REGION 1..123: note = Description of Artificial Sequence: Synthetic polypeptide
QVQLVESGGGVVQPGRSLRLSCAASGFTFSSYGMHWVRQAPGKGLEWVAVIWYDGSNKYYADSVKGRFTISRDNSKNTLYLQMNSLRAEDTAVYYCARYYDILTGYYNYFDYWGQGTLVTVSS

SEQ ID NO: 32361 - protein, 127 aa, synthetic construct
  REGION 1..127: note = Description of Artificial Sequence: Synthetic polypeptide
EVQLVESGGGLVQPGGSLRLSCAASGFTFSSYSMNWVRQAPGKGLEWVSYISSSSSTIYYADSVKGRFTISRDNAKNSLYLQMNSLRDEDTAVYYCARDIVVVVAATYYYYYGMDVWGQGTTVTVSS

SEQ ID NO: 32362 - protein, 106 aa, synthetic construct
  REGION 1..106: note = Description of Artificial Sequence: Synthetic polypeptide
QVQLQESGPGLVKPSETLSLTCTVSGGSISSYYWSWIRQPPGKGLEWIGYIYYSGSTNYNPSLKSRVTISVDTSKNQFSLKLSSVTAADTAVYYCARVLRYFDWLL

SEQ ID NO: 32363 - protein, 20 aa, synthetic construct
  REGION 1..20: note = Description of Artificial Sequence: Synthetic peptide
YYYYYGMDVWGQGTTVTVSS

SEQ ID NO: 32364 - protein, 119 aa, synthetic construct
  REGION 1..119: note = Description of Artificial Sequence: Synthetic polypeptide
EVQLLESGGGLVQPGGSLRLSCAASGFTFSSYAMSWVRQAPGKGLEWVSAISGSGGSTYYADSVKGRFTISRDNSKNTLYLQMNSLRAEDTAVYYCAKDYGGNSYFDYWGQGTLVTVSS

SEQ ID NO: 32365 - protein, 99 aa, synthetic construct
  REGION 1..99: note = Description of Artificial Sequence: Synthetic polypeptide
QVQLVESGGGVVQPGRSLRLSCAASGFTFSSYAMHWVRQAPGKGLEWVAVISYDGSNKYYADSVKGRFTISRDNSKNTLYLQMNSLRAEDTAVYYCARV

SEQ ID NO: 32366 - protein, 23 aa, synthetic construct
  REGION 1..23: note = Description of Artificial Sequence: Synthetic peptide
LELYYYYYGMDVWGQGTTVTVSS

SEQ ID NO: 32367 - protein, 120 aa, synthetic construct
  REGION 1..120: note = Description of Artificial Sequence: Synthetic polypeptide
EVQLLESGGGLVQPGGSLRLSCAASGFTFSSYAMSWVRQAPGKGLEWVSAISGSGGSTYYADSVKGRFTISRDNSKNTLYLQMNSLRAEDTAVYYCAKRDGYNYDAFDIWGQGTMVTVSS

SEQ ID NO: 32368 - protein, 119 aa, synthetic construct
  REGION 1..119: note = Description of Artificial Sequence: Synthetic polypeptide
QVQLVQSGAEVKKPGASVKVSCKASGYTFTGYYMHWVRQAPGQGLEWMGWINPNSGGTNYAQKFQGRVTMTRDTSISTAYMELSRLRSDDTAVYYCARGTTGTDAFDIWGQGTMVTVSS

SEQ ID NO: 32369 - protein, 123 aa, synthetic construct
  REGION 1..123: note = Description of Artificial Sequence: Synthetic polypeptide
EVQLLESGGGLVQPGGSLRLSCAASGFTFSSYAMSWVRQAPGKGLEWVSAISGSGGSTYYADSVKGRFTISRDNSKNTLYLQMNSLRAEDTAVYYCAKYYYDSSGYYYYFDYWGQGTLVTVSS

SEQ ID NO: 32370 - protein, 125 aa, synthetic construct
  REGION 1..125: note = Description of Artificial Sequence: Synthetic polypeptide
QVQLVESGGGVVQPGRSLRLSCAASGFTFSSYGMHWVRQAPGKGLEWVAVIWYDGSNKYYADSVKGRFTISRDNSKNTLYLQMNSLRAEDTAVYYCARYYYDSSGYYYAEYFQHWGQGTLVTVSS

SEQ ID NO: 32371 - protein, 119 aa, synthetic construct
  REGION 1..119: note = Description of Artificial Sequence: Synthetic polypeptide
EVQLLESGGGLVQPGGSLRLSCAASGFTFSSYAMSWVRQAPGKGLEWVSAISGSGGSTYYADSVKGRFTISRDNSKNTLYLQMNSLRAEDTAVYYCAKRDGYNYYFDYWGQGTLVTVSS

SEQ ID NO: 32372 - protein, 122 aa, synthetic construct
  REGION 1..122: note = Description of Artificial Sequence: Synthetic polypeptide
QVQLVESGGGVVQPGRSLRLSCAASGFTFSSYGMHWVRQAPGKGLEWVAVIWYDGSNKYYADSVKGRFTISRDNSKNTLYLQMNSLRAEDTAVYYCARTTVTYYYYYGMDVWGQGTTVTVSS

SEQ ID NO: 32373 - protein, 102 aa, synthetic construct
  REGION 1..102: note = Description of Artificial Sequence: Synthetic polypeptide
EVQLLESGGGLVQPGGSLRLSCAASGFTFSSYAMSWVRQAPGKGLEWVSAISGSGGSTYYADSVKGRFTISRDNSKNTLYLQMNSLRAEDTAVYYCAKRILY

SEQ ID NO: 32374 - protein, 21 aa, synthetic construct
  REGION 1..21: note = Description of Artificial Sequence: Synthetic peptide
WCMLYDAFDIWGQGTMVTVSS

SEQ ID NO: 32375 - protein, 124 aa, synthetic construct
  REGION 1..124: note = Description of Artificial Sequence: Synthetic polypeptide
QVQLVESGGGVVQPGRSLRLSCAASGFTFSSYAMHWVRQAPGKGLEWVAVISYDGSNKYYADSVKGRFTISRDNSKNTLYLQMNSLRAEDTAVYYCARWIQLWLYYYYYGMDVWGQGTTVTVSS

SEQ ID NO: 32376 - protein, 121 aa, synthetic construct
  REGION 1..121: note = Description of Artificial Sequence: Synthetic polypeptide
QVQLVESGGGVVQPGRSLRLSCAASGFTFSSYAMHWVRQAPGKGLEWVAVISYDGSNKYYADSVKGRFTISRDNSKNTLYLQMNSLRAEDTAVYYCARGYSSGWYNWFDPWGQGTLVTVSS

SEQ ID NO: 32377 - protein, 122 aa, synthetic construct
  REGION 1..122: note = Description of Artificial Sequence: Synthetic polypeptide
EVQLVESGGGLVKPGGSLRLSCAASGFTFSSYSMNWVRQAPGKGLEWVSSISSSSSYIYYADSVKGRFTISRDNAKNSLYLQMNSLRAEDTAVYYCARITMVRGVIIYFDYWGQGTLVTVSS

SEQ ID NO: 32378 - protein, 122 aa, synthetic construct
  REGION 1..122: note = Description of Artificial Sequence: Synthetic polypeptide
QVQLQESGPGLVKPSETLSLTCTVSGGSISSYYWSWIRQPPGKGLEWIGYIYYSGSTNYNPSLKSRVTISVDTSKNQFSLKLSSVTAADTAVYYCARDYGDYYYYYYGMDVWGQGTTVTVSS

SEQ ID NO: 32379 - protein, 123 aa, synthetic construct
  REGION 1..123: note = Description of Artificial Sequence: Synthetic polypeptide
QVQLVESGGGVVQPGRSLRLSCAASGFTFSSYGMHWVRQAPGKGLEWVAVISYDGSNKYYADSVKGRFTISRDNSKNTLYLQMNSLRAEDTAVYYCAKDYGDYYYYYYGMDVWGQGTTVTVSS

SEQ ID NO: 32380 - protein, 121 aa, synthetic construct
  REGION 1..121: note = Description of Artificial Sequence: Synthetic polypeptide
EVQLLESGGGLVQPGGSLRLSCAASGFTFSSYAMSWVRQAPGKGLEWVSAISGSGGSTYYADSVKGRFTISRDNSKNTLYLQMNSLRAEDTAVYYCAKGYSGYDYNWFDPWGQGTLVTVSS

SEQ ID NO: 32381 - protein, 108 aa, synthetic construct
  REGION 1..108: note = Description of Artificial Sequence: Synthetic polypeptide
QLQLQESGPGLVKPSETLSLTCTVSGGSISSSSYYWGWIRQPPGKGLEWIGSIYYSGSTYYNPSLKSRVTISVDTSKNQFSLKLSSVTAADTAVYYCARVLRYFDWLL

SEQ ID NO: 32382 - protein, 15 aa, synthetic construct
  REGION 1..15: note = Description of Artificial Sequence: Synthetic peptide
YFDYWGQGTLVTVSS

SEQ ID NO: 32383 - protein, 122 aa, synthetic construct
  REGION 1..122: note = Description of Artificial Sequence: Synthetic polypeptide
QVQLQESGPGLVKPSQTLSLTCTVSGGSISSGGYYWSWIRQHPGKGLEWIGYIYYSGSTYYNPSLKSRVTISVDTSKNQFSLKLSSVTAADTAVYYCARRDGYNYYWYFDLWGRGTLVTVSS

SEQ ID NO: 32384 - protein, 123 aa, synthetic construct
  REGION 1..123: note = Description of Artificial Sequence: Synthetic polypeptide
QVQLVESGGGVVQPGRSLRLSCAASGFTFSSYGMHWVRQAPGKGLEWVAVIWYDGSNKYYADSVKGRFTISRDNSKNTLYLQMNSLRAEDTAVYYCARDYSNYYYYYYGMDVWGQGTTVTVSS

SEQ ID NO: 32385 - protein, 106 aa, synthetic construct; identical to SEQ ID NO: 32362
  REGION 1..106: note = Description of Artificial Sequence: Synthetic polypeptide

SEQ ID NO: 32386 - protein, 15 aa, synthetic construct
  REGION 1..15: note = Description of Artificial Sequence: Synthetic peptide
YFDYWGQGTLVTVSS

SEQ ID NO: 32387 - protein, 129 aa, synthetic construct
  REGION 1..129: note = Description of Artificial Sequence: Synthetic polypeptide
QVQLQESGPGLVKPSQTLSLTCTVSGGSISSGGYYWSWIRQHPGKGLEWIGYIYYSGSTYYNPSLKSRVTISVDTSKNQFSLKLSSVTAADTAVYYCARYYYDSSGYYYYYYYYGMDVWGQGTTVTVSS

SEQ ID NO: 32388 - protein, 129 aa, synthetic construct
  REGION 1..129: note = Description of Artificial Sequence: Synthetic polypeptide
QVQLQESGPGLVKPSQTLSLTCTVSGGSISSGDYYWSWIRQPPGKGLEWIGYIYYSGSTYYNPSLKSRVTISVDTSKNQFSLKLSSVTAADTAVYYCARYYYDSSGYYYYYYYYGMDVWGQGTTVTVSS

SEQ ID NO: 32389 - protein, 121 aa, synthetic construct
  REGION 1..121: note = Description of Artificial Sequence: Synthetic polypeptide
QVQLQESGPGLVKPSQTLSLTCTVSGGSISSGGYYWSWIRQHPGKGLEWIGYIYYSGSTYYNPSLKSRVTISVDTSKNQFSLKLSSVTAADTAVYYCARRDGYNYNWFDPWGQGTLVTVSS

SEQ ID NO: 32390 - protein, 127 aa, synthetic construct
  REGION 1..127: note = Description of Artificial Sequence: Synthetic polypeptide
QVQLVESGGGVVQPGRSLRLSCAASGFTFSSYGMHWVRQAPGKGLEWVAVIWYDGSNKYYADSVKGRFTISRDNSKNTLYLQMNSLRAEDTAVYYCARDIVVVVAATYYYYYGMDVWGQGTTVTVSS

SEQ ID NO: 32391 - protein, 119 aa, synthetic construct
  REGION 1..119: note = Description of Artificial Sequence: Synthetic polypeptide
EVQLVESGGGLVKPGGSLRLSCAASGFTFSSYSMNWVRQAPGKGLEWVSSISSSSSYIYYADSVKGRFTISRDNAKNSLYLQMNSLRAEDTAVYYCARYNWNDNWFDPWGQGTLVTVSS

SEQ ID NO: 32392 - protein, 119 aa, synthetic construct
  REGION 1..119: note = Description of Artificial Sequence: Synthetic polypeptide
EVQLLESGGGLVQPGGSLRLSCAASGFTFSSYAMSWVRQAPGKGLEWVSAISGSGGSTYYADSVKGRFTISRDNSKNTLYLQMNSLRAEDTAVYYCAKGTTGTDAFDIWGQGTMVTVSS

SEQ ID NO: 32393 - protein, 116 aa, synthetic construct
  REGION 1..116: note = Description of Artificial Sequence: Synthetic polypeptide
QVQLVESGGGLVKPGGSLRLSCAASGFTFSDYYMSWIRQAPGKGLEWVSYISSSGSTIYYADSVKGRFTISRDNAKNSLYLQMNSLRAEDTAVYYCARNWGYFDYWGQGTLVTVSS

SEQ ID NO: 32394 - protein, 119 aa, synthetic construct
  REGION 1..119: note = Description of Artificial Sequence: Synthetic polypeptide
EVQLLESGGGLVQPGGSLRLSCAASGFTFSSYAMSWVRQAPGKGLEWVSAISGSGGSTYYADSVKGRFTISRDNSKNTLYLQMNSLRAEDTAVYYCAKGIAVAGYFDYWGQGTLVTVSS

SEQ ID NO: 32395 - protein, 120 aa, synthetic construct
  REGION 1..120: note = Description of Artificial Sequence: Synthetic polypeptide
QVQLQESGPGLVKPSQTLSLTCTVSGGSISSGGYYWSWIRQHPGKGLEWIGYIYYSGSTYYNPSLKSRVTISVDTSKNQFSLKLSSVTAADTAVYYCARRDGYNYYFDYWGQGTLVTVSS

SEQ ID NO: 32396 - protein, 100 aa, synthetic construct
  REGION 1..100: note = Description of Artificial Sequence: Synthetic polypeptide
EVQLLESGGGLVQPGGSLRLSCAASGFTFSSYAMSWVRQAPGKGLEWVSAISGSGGSTYYADSVKGRFTISRDNSKNTLYLQMNSLRAEDTAVYYCAKVL

SEQ ID NO: 32397 - protein, 25 aa, synthetic construct
  REGION 1..25: note = Description of Artificial Sequence: Synthetic peptide
LRLGELSLYDAFDIWGQGTMVTVSS

SEQ ID NO: 32398 - protein, 98 aa, synthetic construct
  REGION 1..98: note = Description of Artificial Sequence: Synthetic polypeptide
EVQLLESGGGLVQPGGSLRLSCAASGFTFSSYAMSWVRQAPGKGLEWVSAISGSGGSTYYADSVKGRFTISRDNSKNTLYLQMNSLRAEDTAVYYCAK

SEQ ID NO: 32399 - protein, 17 aa, synthetic construct
  REGION 1..17: note = Description of Artificial Sequence: Synthetic peptide
LGYFDYWGQGTLVTVSS

SEQ ID NO: 32400 - protein, 124 aa, synthetic construct
  REGION 1..124: note = Description of Artificial Sequence: Synthetic polypeptide
QVQLQESGPGLVKPSQTLSLTCTVSGGSISSGGYYWSWIRQHPGKGLEWIGYIYYSGSTYYNPSLKSRVTISVDTSKNQFSLKLSSVTAADTAVYYCARGTTGTYYYYYGMDVWGQGTTVTVSS

SEQ ID NO: 32401 - protein, 117 aa, synthetic construct
  REGION 1..117: note = Description of Artificial Sequence: Synthetic polypeptide
QVQLQQWGAGLLKPSETLSLTCAVYGGSFSGYYWSWIRQPPGKGLEWIGEINHSGSTNYNPSLKSRVTISVDTSKNQFSLKLSSVTAADTAVYYCARDYSNYYFDYWGQGTLVTVSS

SEQ ID NO: 32402 - protein, 118 aa, synthetic construct
  REGION 1..118: note = Description of Artificial Sequence: Synthetic polypeptide
QVQLVESGGGVVQPGRSLRLSCAASGFTFSSYAMHWVRQAPGKGLEWVAVISYDGSNKYYADSVKGRFTISRDNSKNTLYLQMNSLRAEDTAVYYCARGTTGTYFDYWGQGTLVTVSS

SEQ ID NO: 32403 - protein, 121 aa, synthetic construct
  REGION 1..121: note = Description of Artificial Sequence: Synthetic polypeptide
QVQLVESGGGVVQPGRSLRLSCAASGFTFSSYGMHWVRQAPGKGLEWVAVIWYDGSNKYYADSVKGRFTISRDNSKNTLYLQMNSLRAEDTAVYYCARNWGYYYYYGMDVWGQGTTVTVSS

SEQ ID NO: 32404 - protein, 121 aa, synthetic construct
  REGION 1..121: note = Description of Artificial Sequence: Synthetic polypeptide
QVQLVQSGAEVKKPGASVKVSCKASGYTFTGYYMHWVRQAPGQGLEWMGWINPNSGGTNYAQKFQGRVTMTRDTSISTAYMELSRLRSDDTAVYYCARGYSYGYAEYFQHWGQGTLVTVSS

SEQ ID NO: 32405 - protein, 124 aa, synthetic construct
  REGION 1..124: note = Description of Artificial Sequence: Synthetic polypeptide
QVQLVQSGAEVKKPGASVKVSCKASGYTFTGYYMHWVRQAPGQGLEWMGWINPNSGGTNYAQKFQGRVTMTRDTSISTAYMELSRLRSDDTAVYYCARYSGSYYYYYYYGMDVWGQGTTVTVSS

SEQ ID NO: 32406 - protein, 118 aa, synthetic construct
  REGION 1..118: note = Description of Artificial Sequence: Synthetic polypeptide
QVQLQQWGAGLLKPSETLSLTCAVYGGSFSGYYWSWIRQPPGKGLEWIGEINHSGSTNYNPSLKSRVTISVDTSKNQFSLKLSSVTAADTAVYYCARDYGDYDAFDIWGQGTMVTVSS

SEQ ID NO: 32407 - protein, 98 aa, synthetic construct; identical to SEQ ID NO: 32241
  REGION 1..98: note = Description of Artificial Sequence: Synthetic polypeptide

SEQ ID NO: 32408 - protein, 25 aa, synthetic construct
  REGION 1..25: note = Description of Artificial Sequence: Synthetic peptide
RWLQLYYYYYGMDVWGQGTTVTVSS

SEQ ID NO: 32409 - protein, 99 aa, synthetic construct; identical to SEQ ID NO: 32275
  REGION 1..99: note = Description of Artificial Sequence: Synthetic polypeptide

SEQ ID NO: 32410 - protein, 24 aa, synthetic construct
  REGION 1..24: note = Description of Artificial Sequence: Synthetic peptide
QWLVYYYYYGMDVWGQGTTVTVSS

SEQ ID NO: 32411 - protein, 99 aa, synthetic construct; identical to SEQ ID NO: 32340
  REGION 1..99: note = Description of Artificial Sequence: Synthetic polypeptide

SEQ ID NO: 32412 - protein, 23 aa, synthetic construct
  REGION 1..23: note = Description of Artificial Sequence: Synthetic peptide
QLVYYYYYGMDVWGQGTTVTVSS

SEQ ID NO: 32413 - protein, 103 aa, synthetic construct
  REGION 1..103: note = Description of Artificial Sequence: Synthetic polypeptide
QVQLVQSGAEVKKPGASVKVSCKASGYTFTSYDINWVRQATGQGLEWMGWMNPNSGNTGYAQKFQGRVTMTRNTSISTAYMELSSLRSEDTAVYYCARSILWW

SEQ ID NO: 32414 - protein, 19 aa, synthetic construct
  REGION 1..19: note = Description of Artificial Sequence: Synthetic peptide
LLFNWFDPWGQGTLVTVSS

SEQ ID NO: 32415 - protein, 127 aa, synthetic construct
  REGION 1..127: note = Description of Artificial Sequence: Synthetic polypeptide
QVQLVQSGAEVKKPGASVKVSCKASGYTFTGYYMHWVRQAPGQGLEWMGWINPNSGGTNYAQKFQGRVTMTRDTSISTAYMELSRLRSDDTAVYYCARITMVRGVIIYYYYYGMDVWGQGTTVTVSS

SEQ ID NO: 32416 - protein, 125 aa, synthetic construct
  REGION 1..125: note = Description of Artificial Sequence: Synthetic polypeptide
QVQLQESGPGLVKPSQTLSLTCTVSGGSISSGGYYWSWIRQHPGKGLEWIGYIYYSGSTYYNPSLKSRVTISVDTSKNQFSLKLSSVTAADTAVYYCARGYSYGYYYYYYGMDVWGQGTTVTVSS

SEQ ID NO: 32417 - protein, 128 aa, synthetic construct
  REGION 1..128: note = Description of Artificial Sequence: Synthetic polypeptide
QVQLVQSGAEVKKPGASVKVSCKASGYTFTSYGISWVRQAPGQGLEWMGWISAYNGNTNYAQKLQGRVTMTTDTSTSTAYMELRSLRSDDTAVYYCARYYDFWSGYYTYYYYYGMDVWGQGTTVTVSS

SEQ ID NO: 32418 - protein, 110 aa, synthetic construct
  REGION 1..110: note = Description of Artificial Sequence: Synthetic polypeptide
QVQLQQSGPGLVKPSQTLSLTCAISGDSVSSNSAAWNWIRQSPSRGLEWLGRTYYRSKWYNDYAVSVKSRITINPDTSKNQFSLQLNSVTPEDTAVYYCARVLRYFDWLL

SEQ ID NO: 32419 - protein, 20 aa, synthetic construct
  REGION 1..20: note = Description of Artificial Sequence: Synthetic peptide
YYYYYGMDVWGQGTTVTVSS

SEQ ID NO: 32420 - protein, 119 aa, synthetic construct
  REGION 1..119: note = Description of Artificial Sequence: Synthetic polypeptide
QVQLVQSGAEVKKPGASVKVSCKASGYTFTGYYMHWVRQAPGQGLEWMGWINPNSGGTNYAQKFQGRVTMTRDTSISTAYMELSRLRSDDTAVYYCARDYGGNSYFDYWGQGTLVTVSS

SEQ ID NO: 32421 - protein, 120 aa, synthetic construct
  REGION 1..120: note = Description of Artificial Sequence: Synthetic polypeptide
QVQLVQSGAEVKKPGASVKVSCKASGYTFTGYYMHWVRQAPGQGLEWMGWINPNSGGTNYAQKFQGRVTMTRDTSISTAYMELSRLRSDDTAVYYCARGYSYGYNWFDPWGQGTLVTVSS

SEQ ID NO: 32422 - protein, 125 aa, synthetic construct
  REGION 1..125: note = Description of Artificial Sequence: Synthetic polypeptide
QVQLVQSGAEVKKPGASVKVSCKASGYTFTSYDINWVRQATGQGLEWMGWMNPNSGNTGYAQKFQGRVTMTRNTSISTAYMELSSLRSEDTAVYYCARGYSSSWYYYYYYGMDVWGQGTTVTVSS

SEQ ID NO: 32423 - protein, 123 aa, synthetic construct
  REGION 1..123: note = Description of Artificial Sequence: Synthetic polypeptide
QVQLVESGGGLVKPGGSLRLSCAASGFTFSDYYMSWIRQAPGKGLEWVSYISSSGSTIYYADSVKGRFTISRDNAKNSLYLQMNSLRAEDTAVYYCARDYGDYYYYYYGMDVWGQGTTVTVSS

SEQ ID NO: 32424 - protein, 123 aa, synthetic construct
  REGION 1..123: note = Description of Artificial Sequence: Synthetic polypeptide
EVQLLESGGGLVQPGGSLRLSCAASGFTFSSYAMSWVRQAPGKGLEWVSAISGSGGSTYYADSVKGRFTISRDNSKNTLYLQMNSLRAEDTAVYYCAKGITGTYYYYYGMDVWGQGTTVTVSS

SEQ ID NO: 32425 - protein, 98 aa, synthetic construct; identical to SEQ ID NO: 32241
  REGION 1..98: note = Description of Artificial Sequence: Synthetic polypeptide

SEQ ID NO: 32426 - protein, 22 aa, synthetic construct
  REGION 1..22: note = Description of Artificial Sequence: Synthetic peptide
LGYYYYYGMDVWGQGTTVTVSS

SEQ ID NO: 32427 - protein, 98 aa, synthetic construct
  REGION 1..98: note = Description of Artificial Sequence: Synthetic polypeptide
QVQLQQWGAGLLKPSETLSLTCAVYGGSFSGYYWSWIRQPPGKGLEWIGEINHSGSTNYNPSLKSRVTISVDTSKNQFSLKLSSVTAADTAVYYCARV

SEQ ID NO: 32428 - protein, 20 aa, synthetic construct
  REGION 1..20: note = Description of Artificial Sequence: Synthetic peptide
QWLVDAFDIWGQGTMVTVSS

SEQ ID NO: 32429 - protein, 120 aa, synthetic construct
  REGION 1..120: note = Description of Artificial Sequence: Synthetic polypeptide
QVQLVESGGGVVQPGRSLRLSCAASGFTFSSYAMHWVRQAPGKGLEWVAVISYDGSNKYYADSVKGRFTISRDNSKNTLYLQMNSLRAEDTAVYYCARDYGDYAEYFQHWGQGTLVTVSS

SEQ ID NO: 32430 - protein, 123 aa, synthetic construct
  REGION 1..123: note = Description of Artificial Sequence: Synthetic polypeptide
QVQLVQSGAEVKKPGASVKVSCKASGYTFTSYGISWVRQAPGQGLEWMGWISAYNGNTNYAQKLQGRVTMTTDTSTSTAYMELRSLRSDDTAVYYCARGTTGTYYYYYGMDVWGQGTTVTVSS

SEQ ID NO: 32431 - protein, 124 aa, synthetic construct
  REGION 1..124: note = Description of Artificial Sequence: Synthetic polypeptide
QVQLVESGGGVVQPGRSLRLSCAASGFTFSSYGMHWVRQAPGKGLEWVAVIWYDGSNKYYADSVKGRFTISRDNSKNTLYLQMNSLRAEDTAVYYCARGYSYGYYYYYYGMDVWGQGTTVTVSS

SEQ ID NO: 32432 - protein, 120 aa, synthetic construct
  REGION 1..120: note = Description of Artificial Sequence: Synthetic polypeptide
QVQLVESGGGVVQPGRSLRLSCAASGFTFSSYGMHWVRQAPGKGLEWVAVIWYDGSNKYYADSVKGRFTISRDNSKNTLYLQMNSLRAEDTAVYYCARRDGYNYNWFDPWGQGTLVTVSS

SEQ ID NO: 32433 - protein, 123 aa, synthetic construct
  REGION 1..123: note = Description of Artificial Sequence: Synthetic polypeptide
QVQLVQSGAEVKKPGASVKVSCKASGYTFTSYGISWVRQAPGQGLEWMGWISAYNGNTNYAQKLQGRVTMTTDTSTSTAYMELRSLRSDDTAVYYCARDYSNYYYYYYGMDVWGQGTTVTVSS

SEQ ID NO: 32434 - protein, 103 aa, synthetic construct
  REGION 1..103: note = Description of Artificial Sequence: Synthetic polypeptide
EVQLVESGGGLVQPGGSLRLSCAASGFTFSSYSMNWVRQAPGKGLEWVSYISSSSSTIYYADSVKGRFTISRDNAKNSLYLQMNSLRDEDTAVYYCARSILWW

SEQ ID NO: 32435 - protein, 18 aa, synthetic construct
  REGION 1..18: note = Description of Artificial Sequence: Synthetic peptide
LLFYFDYWGQGTLVTVSS

SEQ ID NO: 32436 - protein, 119 aa, synthetic construct
  REGION 1..119: note = Description of Artificial Sequence: Synthetic polypeptide
EVQLVESGGGLVQPGGSLRLSCAASGFTFSSYSMNWVRQAPGKGLEWVSYISSSSSTIYYADSVKGRFTISRDNAKNSLYLQMNSLRDEDTAVYYCAREYSSSSYFDYWGQGTLVTVSS

SEQ ID NO: 32437 - protein, 98 aa, synthetic construct
  REGION 1..98: note = Description of Artificial Sequence: Synthetic polypeptide
QVQLQESGPGLVKPSETLSLTCTVSGGSISSYYWSWIRQPPGKGLEWIGYIYYSGSTNYNPSLKSRVTISVDTSKNQFSLKLSSVTAADTAVYYCARV

SEQ ID NO: 32438 - protein, 24 aa, synthetic construct
  REGION 1..24: note = Description of Artificial Sequence: Synthetic peptide
QWLVYYYYYGMDVWGQGTTVTVSS

SEQ ID NO: 32439 - protein, 122 aa, synthetic construct
  REGION 1..122: note = Description of Artificial Sequence: Synthetic polypeptide
EVQLLESGGGLVQPGGSLRLSCAASGFTFSSYAMSWVRQAPGKGLEWVSAISGSGGSTYYADSVKGRFTISRDNSKNTLYLQMNSLRAEDTAVYYCAKDIVVVVAATYFDYWGQGTLVTVSS

SEQ ID NO: 32440 - protein, 125 aa, synthetic construct
  REGION 1..125: note = Description of Artificial Sequence: Synthetic polypeptide
EVQLLESGGGLVQPGGSLRLSCAASGFTFSSYAMSWVRQAPGKGLEWVSAISGSGGSTYYADSVKGRFTISRDNSKNTLYLQMNSLRAEDTAVYYCAKYYYDSSGYYYAEYFQHWGQGTLVTVSS

SEQ ID NO: 32441 - protein, 124 aa, synthetic construct
  REGION 1..124: note = Description of Artificial Sequence: Synthetic polypeptide
QVQLVQSGAEVKKPGASVKVSCKASGYTFTGYYMHWVRQAPGQGLEWMGWINPNSGGTNYAQKFQGRVTMTRDTSISTAYMELSRLRSDDTAVYYCARDYGGNSYYYYYGMDVWGQGTTVTVSS

SEQ ID NO: 32442 - protein, 99 aa, synthetic construct
  REGION 1..99: note = Description of Artificial Sequence: Synthetic polypeptide
QLQLQESGPGLVKPSETLSLTCTVSGGSISSSSYYWGWIRQPPGKGLEWIGSIYYSGSTYYNPSLKSRVTISVDTSKNQFSLKLSSVTAADTAVYYCAR

SEQ ID NO: 32443 - skipped

SEQ ID NO: 32444 - protein, 16 aa, synthetic construct
  REGION 1..16: note = Description of Artificial Sequence: Synthetic peptide
LYFDYWGQGTLVTVSS

SEQ ID NO: 32445 - protein, 119 aa, synthetic construct
  REGION 1..119: note = Description of Artificial Sequence: Synthetic polypeptide
EVQLLESGGGLVQPGGSLRLSCAASGFTFSSYAMSWVRQAPGKGLEWVSAISGSGGSTYYADSVKGRFTISRDNSKNTLYLQMNSLRAEDTAVYYCAKDYSNYNWFDPWGQGTLVTVSS

SEQ ID NO: 32446 - protein, 123 aa, synthetic construct
  REGION 1..123: note = Description of Artificial Sequence: Synthetic polypeptide
QVQLVQSGAEVKKPGASVKVSCKASGYTFTSYYMHWVRQAPGQGLEWMGIINPSGGSTSYAQKFQGRVTMTRDTSTSTVYMELSSLRSEDTAVYYCARSIAARYYYYYGMDVWGQGTTVTVSS

SEQ ID NO: 32447 - protein, 124 aa, synthetic construct
  REGION 1..124: note = Description of Artificial Sequence: Synthetic polypeptide
QVQLQESGPGLVKPSQTLSLTCTVSGGSISSGGYYWSWIRQHPGKGLEWIGYIYYSGSTYYNPSLKSRVTISVDTSKNQFSLKLSSVTAADTAVYYCARDYGDYYYYYYGMDVWGQGTTVTVSS

SEQ ID NO: 32448 - protein, 120 aa, synthetic construct
  REGION 1..120: note = Description of Artificial Sequence: Synthetic polypeptide
QVQLVESGGGVVQPGRSLRLSCAASGFTFSSYGMHWVRQAPGKGLEWVAVIWYDGSNKYYADSVKGRFTISRDNSKNTLYLQMNSLRAEDTAVYYCARDYGDYAEYFQHWGQGTLVTVSS

SEQ ID NO: 32449 - protein, 121 aa, synthetic construct
  REGION 1..121: note = Description of Artificial Sequence: Synthetic polypeptide
EVQLLESGGGLVQPGGSLRLSCAASGFTFSSYAMSWVRQAPGKGLEWVSAISGSGGSTYYADSVKGRFTISRDNSKNTLYLQMNSLRAEDTAVYYCAKLTGYYYYYGMDVWGQGTTVTVSS

SEQ ID NO: 32450 - protein, 123 aa, synthetic construct
  REGION 1..123: note = Description of Artificial Sequence: Synthetic polypeptide
EVQLVESGGGLVQPGGSLRLSCAASGFTFSSYSMNWVRQAPGKGLEWVSYISSSSSTIYYADSVKGRFTISRDNAKNSLYLQMNSLRDEDTAVYYCARDYSNYYYYYYGMDVWGQGTTVTVSS

SEQ ID NO: 32451 - protein, 125 aa, synthetic construct
  REGION 1..125: note = Description of Artificial Sequence: Synthetic polypeptide
QVQLVQSGAEVKKPGASVKVSCKASGYTFTSYDINWVRQATGQGLEWMGWMNPNSGNTGYAQKFQGRVTMTRNTSISTAYMELSSLRSEDTAVYYCARVDIVATIYYYYYGMDVWGQGTTVTVSS

SEQ ID NO: 32452 - protein, 128 aa, synthetic construct
  REGION 1..128: note = Description of Artificial Sequence: Synthetic polypeptide
QVQLVQSGAEVKKPGASVKVSCKASGYTFTGYYMHWVRQAPGQGLEWMGWINPNSGGTNYAQKFQGRVTMTRDTSISTAYMELSRLRSDDTAVYYCARYYDFWSGYYTYYYYYGMDVWGQGTTVTVSS

SEQ ID NO: 32453 - protein, 128 aa, synthetic construct
  REGION 1..128: note = Description of Artificial Sequence: Synthetic polypeptide
QVQLVESGGGVVQPGRSLRLSCAASGFTFSSYGMHWVRQAPGKGLEWVAVIWYDGSNKYYADSVKGRFTISRDNSKNTLYLQMNSLRAEDTAVYYCARYYDFWSGYYTYYYYYGMDVWGQGTTVTVSS

SEQ ID NO: 32454 - protein, 118 aa, synthetic construct
  REGION 1..118: note = Description of Artificial Sequence: Synthetic polypeptide
QVQLQESGPGLVKPSQTLSLTCTVSGGSISSGGYYWSWIRQHPGKGLEWIGYIYYSGSTYYNPSLKSRVTISVDTSKNQFSLKLSSVTAADTAVYYCARNWGNWFDPWGQGTLVTVSS

SEQ ID NO: 32455 - protein, 120 aa, synthetic construct
  REGION 1..120: note = Description of Artificial Sequence: Synthetic polypeptide
EVQLVESGGGLVQPGGSLRLSCAASGFTFSSYWMSWVRQAPGKGLEWVANIKQDGSEKYYVDSVKGRFTISRDNAKNSLYLQMNSLRAEDTAVYYCARGYSSSWYYFDYWGQGTLVTVSS

SEQ ID NO: 32456 - protein, 120 aa, synthetic construct
  REGION 1..120: note = Description of Artificial Sequence: Synthetic polypeptide
EVQLVESGGGLVKPGGSLRLSCAASGFTFSSYSMNWVRQAPGKGLEWVSSISSSSSYIYYADSVKGRFTISRDNAKNSLYLQMNSLRAEDTAVYYCARGIAVAGNWFDPWGQGTLVTVSS

SEQ ID NO: 32457 - protein, 128 aa, synthetic construct
  REGION 1..128: note = Description of Artificial Sequence: Synthetic polypeptide
EVQLVQSGAEVKKPGESLKISCKGSGYSFTSYWIGWVRQMPGKGLEWMGIIYPGDSDTRYSPSFQGQVTISADKSISTAYLQWSSLKASDTAMYYCARYYYDSSGYYYYYYYYGMDVWGQGTTVTVSS

SEQ ID NO: 32458 - protein, 120 aa, synthetic construct
  REGION 1..120: note = Description of Artificial Sequence: Synthetic polypeptide
QVQLVESGGGVVQPGRSLRLSCAASGFTFSSYGMHWVRQAPGKGLEWVAVIWYDGSNKYYADSVKGRFTISRDNSKNTLYLQMNSLRAEDTAVYYCARGYSSGWYYFDYWGQGTLVTVSS

SEQ ID NO: 32459 - protein, 129 aa, synthetic construct
  REGION 1..129: note = Description of Artificial Sequence: Synthetic polypeptide
QVQLQESGPGLVKPSQTLSLTCTVSGGSISSGGYYWSWIRQHPGKGLEWIGYIYYSGSTYYNPSLKSRVTISVDTSKNQFSLKLSSVTAADTAVYYCARGYCSSTSCYTYYYYYGMDVWGQGTTVTVSS

SEQ ID NO: 32460 - protein, 124 aa, synthetic construct
  REGION 1..124: note = Description of Artificial Sequence: Synthetic polypeptide
QVQLVESGGGVVQPGRSLRLSCAASGFTFSSYGMHWVRQAPGKGLEWVAVIWYDGSNKYYADSVKGRFTISRDNSKNTLYLQMNSLRAEDTAVYYCARRDGYNYYYYYYGMDVWGQGTTVTVSS

SEQ ID NO: 32461 - protein, 124 aa, synthetic construct
  REGION 1..124: note = Description of Artificial Sequence: Synthetic polypeptide
EVQLVESGGGLVQPGGSLRLSCAASGFTFSSYSMNWVRQAPGKGLEWVSYISSSSSTIYYADSVKGRFTISRDNAKNSLYLQMNSLRDEDTAVYYCARVDTAMVYYYYYGMDVWGQGTTVTVSS

SEQ ID NO: 32462 - protein, 124 aa, synthetic construct
  REGION 1..124: note = Description of Artificial Sequence: Synthetic polypeptide
QVQLVESGGGVVQPGRSLRLSCAASGFTFSSYGMHWVRQAPGKGLEWVAVIWYDGSNKYYADSVKGRFTISRDNSKNTLYLQMNSLRAEDTAVYYCARVEMATIYYYYYGMDVWGQGTTVTVSS

SEQ ID NO: 32463 - protein, 107 aa, synthetic construct; identical to SEQ ID NO: 32312
  REGION 1..107: note = Description of Artificial Sequence: Synthetic polypeptide

SEQ ID NO: 32464 - protein, 20 aa, synthetic construct
  REGION 1..20: note = Description of Artificial Sequence: Synthetic peptide
YYYYYGMDVWGQGTTVTVSS

SEQ ID NO: 32465 - protein, 116 aa, synthetic construct
  REGION 1..116: note = Description of Artificial Sequence: Synthetic polypeptide
QVQLVQSGAEVKKPGASVKVSCKASGYTFTSYYMHWVRQAPGQGLEWMGIINPSGGSTSYAQKFQGRVTMTRDTSTSTVYMELSSLRSEDTAVYYCARNWGYFDYWGQGTLVTVSS

SEQ ID NO: 32466 - protein, 98 aa, synthetic construct
  REGION 1..98: note = Description of Artificial Sequence: Synthetic polypeptide
QVQLVESGGGVVQPGRSLRLSCAASGFTFSSYAMHWVRQAPGKGLEWVAVISYDGSNKYYADSVKGRFTISRDNSKNTLYLQMNSLRAEDTAVYYCAR

SEQ ID NO: 32467 - skipped

SEQ ID NO: 32468 - protein, 21 aa, synthetic construct
  REGION 1..21: note = Description of Artificial Sequence: Synthetic peptide
LYYYYYGMDVWGQGTTVTVSS

SEQ ID NO: 32469 - protein, 126 aa, synthetic construct
  REGION 1..126: note = Description of Artificial Sequence: Synthetic polypeptide
QVQLQQSGPGLVKPSQTLSLTCAISGDSVSSNSAAWNWIRQSPSRGLEWLGRTYYRSKWYNDYAVSVKSRITINPDTSKNQFSLQLNSVTPEDTAVYYCARSIAARYYYYYGMDVWGQGTTVTVSS

SEQ ID NO: 32470 - protein, 123 aa, synthetic construct
  REGION 1..123: note = Description of Artificial Sequence: Synthetic polypeptide
QVQLVESGGGVVQPGRSLRLSCAASGFTFSSYGMHWVRQAPGKGLEWVAVIWYDGSNKYYADSVKGRFTISRDNSKNTLYLQMNSLRAEDTAVYYCARYNWNDYYYYYGMDVWGQGTTVTVSS

SEQ ID NO: 32471 - protein, 118 aa, synthetic construct
  REGION 1..118: note = Description of Artificial Sequence: Synthetic polypeptide
QVQLVESGGGVVQPGRSLRLSCAASGFTFSSYGMHWVRQAPGKGLEWVAVIWYDGSNKYYADSVKGRFTISRDNSKNTLYLQMNSLRAEDTAVYYCARGTTGTYFDYWGQGTLVTVSS

SEQ ID NO: 32472 - protein, 120 aa, synthetic construct
  REGION 1..120: note = Description of Artificial Sequence: Synthetic polypeptide
QITLKESGPTLVKPTQTLTLTCTFSGFSLSTSGVGVGWIRQPPGKALEWLALIYWNDDKRYSPSLKSRLTITKDTSKNQVVLTMTNMDPVDTATYYCAHSIAARDAFDIWGQGTMVTVSS

SEQ ID NO: 32473 - protein, 124 aa, synthetic construct
  REGION 1..124: note = Description of Artificial Sequence: Synthetic polypeptide
QVQLVQSGAEVKKPGASVKVSCKASGYTFTSYDINWVRQATGQGLEWMGWMNPNSGNTGYAQKFQGRVTMTRNTSISTAYMELSSLRSEDTAVYYCARGYSYGYYYYYYGMDVWGQGTTVTVSS

SEQ ID NO: 32474 - protein, 124 aa, synthetic construct
  REGION 1..124: note = Description of Artificial Sequence: Synthetic polypeptide
QVQLQQSGPGLVKPSQTLSLTCAISGDSVSSNSAAWNWIRQSPSRGLEWLGRTYYRSKWYNDYAVSVKSRITINPDTSKNQFSLQLNSVTPEDTAVYYCARRDGYNYYWYFDLWGRGTLVTVSS

SEQ ID NO: 32475 - protein, 120 aa, synthetic construct
  REGION 1..120: note = Description of Artificial Sequence: Synthetic polypeptide
QVQLVQSGAEVKKPGASVKVSCKASGYTFTGYYMHWVRQAPGQGLEWMGWINPNSGGTNYAQKFQGRVTMTRDTSISTAYMELSRLRSDDTAVYYCARRDGYNYNWFDPWGQGTLVTVSS

SEQ ID NO: 32476 - protein, 117 aa, synthetic construct
  REGION 1..117: note = Description of Artificial Sequence: Synthetic polypeptide
QITLKESGPTLVKPTQTLTLTCTFSGFSLSTSGVGVGWIRQPPGKALEWLALIYWNDDKRYSPSLKSRLTITKDTSKNQVVLTMTNMDPVDTATYYCAHLTGYFDYWGQGTLVTVSS

SEQ ID NO: 32477 - protein, 121 aa, synthetic construct
  REGION 1..121: note = Description of Artificial Sequence: Synthetic polypeptide
QITLKESGPTLVKPTQTLTLTCTFSGFSLSTSGVGVGWIRQPPGKALEWLALIYWNDDKRYSPSLKSRLTITKDTSKNQVVLTMTNMDPVDTATYYCAHSIAARAEYFQHWGQGTLVTVSS

SEQ ID NO: 32478 - protein, 128 aa, synthetic construct
  REGION 1..128: note = Description of Artificial Sequence: Synthetic polypeptide
QVQLVESGGGVVQPGRSLRLSCAASGFTFSSYAMHWVRQAPGKGLEWVAVISYDGSNKYYADSVKGRFTISRDNSKNTLYLQMNSLRAEDTAVYYCARYYYGSGSYYNYYYYYGMDVWGQGTTVTVSS

SEQ ID NO: 32479 - protein, 125 aa, synthetic construct
  REGION 1..125: note = Description of Artificial Sequence: Synthetic polypeptide
EVQLVESGGGLVQPGGSLRLSCAASGFTFSSYWMSWVRQAPGKGLEWVANIKQDGSEKYYVDSVKGRFTISRDNAKNSLYLQMNSLRAEDTAVYYCARGYSGYDYYYYYYGMDVWGQGTTVTVSS

SEQ ID NO: 32480 - protein, 123 aa, synthetic construct
  REGION 1..123: note = Description of Artificial Sequence: Synthetic polypeptide
QVQLVESGGGVVQPGRSLRLSCAASGFTFSSYAMHWVRQAPGKGLEWVAVISYDGSNKYYADSVKGRFTISRDNSKNTLYLQMNSLRAEDTAVYYCARDYGDYYYYYYGMDVWGQGTTVTVSS

SEQ ID NO: 32481 - protein, 130 aa, synthetic construct
  REGION 1..130: note = Description of Artificial Sequence: Synthetic polypeptide
QVQLVESGGGVVQPGRSLRLSCAASGFTFSSYGMHWVRQAPGKGLEWVAVIWYDGSNKYYADSVKGRFTISRDNSKNTLYLQMNSLRAEDTAVYYCARYYDYVWGSYRYTYYYYYGMDVWGQGTTVTVSS

SEQ ID NO: 32482 - protein, 120 aa, synthetic construct
  REGION 1..120: note = Description of Artificial Sequence: Synthetic polypeptide
QITLKESGPTLVKPTQTLTLTCTFSGFSLSTSGVGVGWIRQPPGKALEWLALIYWNDDKRYSPSLKSRLTITKDTSKNQVVLTMTNMDPVDTATYYCAHGTTGTDAFDIWGQGTMVTVSS

SEQ ID NO: 32483 - protein, 119 aa, synthetic construct
  REGION 1..119: note = Description of Artificial Sequence: Synthetic polypeptide
EVQLVESGGGLVQPGGSLRLSCAASGFTFSSYSMNWVRQAPGKGLEWVSYISSSSSTIYYADSVKGRFTISRDNAKNSLYLQMNSLRDEDTAVYYCARDYSNYDAFDIWGQGTMVTVSS

SEQ ID NO: 32484 - protein, 124 aa, synthetic construct
  REGION 1..124: note = Description of Artificial Sequence: Synthetic polypeptide
QVQLVQSGAEVKKPGASVKVSCKASGYTFTGYYMHWVRQAPGQGLEWMGWINPNSGGTNYAQKFQGRVTMTRDTSISTAYMELSRLRSDDTAVYYCARYYYDSSGYYYDAFDIWGQGTMVTVSS

SEQ ID NO: 32485 - protein, 126 aa, synthetic construct
  REGION 1..126: note = Description of Artificial Sequence: Synthetic polypeptide
QVQLQQSGPGLVKPSQTLSLTCAISGDSVSSNSAAWNWIRQSPSRGLEWLGRTYYRSKWYNDYAVSVKSRITINPDTSKNQFSLQLNSVTPEDTAVYYCARDYGDYYYYYYGMDVWGQGTTVTVSS

SEQ ID NO: 32486 - protein, 117 aa, synthetic construct
  REGION 1..117: note = Description of Artificial Sequence: Synthetic polypeptide
QVQLVESGGGVVQPGRSLRLSCAASGFTFSSYGMHWVRQAPGKGLEWVAVIWYDGSNKYYADSVKGRFTISRDNSKNTLYLQMNSLRAEDTAVYYCARLTGDAFDIWGQGTMVTVSS

SEQ ID NO: 32487 - protein, 123 aa, synthetic construct
  REGION 1..123: note = Description of Artificial Sequence: Synthetic polypeptide
QVQLQESGPGLVKPSQTLSLTCTVSGGSISSGGYYWSWIRQHPGKGLEWIGYIYYSGSTYYNPSLKSRVTISVDTSKNQFSLKLSSVTAADTAVYYCARDIVVVVAATYFDYWGQGTLVTVSS

SEQ ID NO: 32488 - protein, 125 aa, synthetic construct
  REGION 1..125: note = Description of Artificial Sequence: Synthetic polypeptide
QVQLVQSGAEVKKPGASVKVSCKASGYTFTSYDINWVRQATGQGLEWMGWMNPNSGNTGYAQKFQGRVTMTRNTSISTAYMELSSLRSEDTAVYYCARGYSGYDYYYYYYGMDVWGQGTTVTVSS

SEQ ID NO: 32489 - protein, 100 aa, synthetic construct
  REGION 1..100: note = Description of Artificial Sequence: Synthetic polypeptide
QITLKESGPTLVKPTQTLTLTCTFSGFSLSTSGVGVGWIRQPPGKALEWLALIYWNDDKRYSPSLKSRLTITKDTSKNQVVLTMTNMDPVDTATYYCAHV

SEQ ID NO: 32490 - protein, 18 aa, synthetic construct
  REGION 1..18: note = Description of Artificial Sequence: Synthetic peptide
QLVYFDYWGQGTLVTVSS

SEQ ID NO: 32491 - protein, 123 aa, synthetic construct
  REGION 1..123: note = Description of Artificial Sequence: Synthetic polypeptide
QVQLQESGPGLVKPSQTLSLTCTVSGGSISSGGYYWSWIRQHPGKGLEWIGYIYYSGSTYYNPSLKSRVTISVDTSKNQFSLKLSSVTAADTAVYYCARDIVLMVYAIYFDYWGQGTLVTVSS

SEQ ID NO: 32492 - protein, 121 aa, synthetic construct
  REGION 1..121: note = Description of Artificial Sequence: Synthetic polypeptide
QVQLQQSGPGLVKPSQTLSLTCAISGDSVSSNSAAWNWIRQSPSRGLEWLGRTYYRSKWYNDYAVSVKSRITINPDTSKNQFSLQLNSVTPEDTAVYYCARDYGDYYFDYWGQGTLVTVSS

SEQ ID NO: 32493 - protein, 123 aa, synthetic construct
  REGION 1..123: note = Description of Artificial Sequence: Synthetic polypeptide
QVQLVESGGGVVQPGRSLRLSCAASGFTFSSYGMHWVRQAPGKGLEWVAVIWYDGSNKYYADSVKGRFTISRDNSKNTLYLQMNSLRAEDTAVYYCARYNWNYYYYYYGMDVWGQGTTVTVSS

SEQ ID NO: 32494 - protein, 124 aa, synthetic construct
  REGION 1..124: note = Description of Artificial Sequence: Synthetic polypeptide
QVQLQESGPGLVKPSQTLSLTCTVSGGSISSGGYYWSWIRQHPGKGLEWIGYIYYSGSTYYNPSLKSRVTISVDTSKNQFSLKLSSVTAADTAVYYCARDYSNYYYYYYGMDVWGQGTTVTVSS

SEQ ID NO: 32495 - protein, 118 aa, synthetic construct
  REGION 1..118: note = Description of Artificial Sequence: Synthetic polypeptide
QVQLQESGPGLVKPSETLSLTCTVSGGSISSYYWSWIRQPPGKGLEWIGYIYYSGSTNYNPSLKSRVTISVDTSKNQFSLKLSSVTAADTAVYYCARGIVGATYFDYWGQGTLVTVSS

SEQ ID NO: 32496 - protein, 119 aa, synthetic construct
  REGION 1..119: note = Description of Artificial Sequence: Synthetic polypeptide
QVQLVESGGGVVQPGRSLRLSCAASGFTFSSYGMHWVRQAPGKGLEWVAVISYDGSNKYYADSVKGRFTISRDNSKNTLYLQMNSLRAEDTAVYYCAKEYSSSSYFDYWGQGTLVTVSS

SEQ ID NO: 32497 - protein, 124 aa, synthetic construct
  REGION 1..124: note = Description of Artificial Sequence: Synthetic polypeptide
QVQLVESGGGVVQPGRSLRLSCAASGFTFSSYGMHWVRQAPGKGLEWVAVIWYDGSNKYYADSVKGRFTISRDNSKNTLYLQMNSLRAEDTAVYYCARGIVGATYYYYYGMDVWGQGTTVTVSS

SEQ ID NO: 32498 - protein, 124 aa, synthetic construct
  REGION 1..124: note = Description of Artificial Sequence: Synthetic polypeptide
QVQLVQSGAEVKKPGASVKVSCKASGYTFTGYYMHWVRQAPGQGLEWMGWINPNSGGTNYAQKFQGRVTMTRDTSISTAYMELSRLRSDDTAVYYCARYYYGSGSYYNNWFDPWGQGTLVTVSS

SEQ ID NO: 32499 - protein, 128 aa, synthetic construct
  REGION 1..128: note = Description of Artificial Sequence: Synthetic polypeptide
QVQLQESGPGLVKPSQTLSLTCTVSGGSISSGDYYWSWIRQPPGKGLEWIGYIYYSGSTYYNPSLKSRVTISVDTSKNQFSLKLSSVTAADTAVYYCARDIVLMVYAIYYYYYGMDVWGQGTTVTVSS

SEQ ID NO: 32500 - protein, 115 aa, synthetic construct
  REGION 1..115: note = Description of Artificial Sequence: Synthetic polypeptide
QVQLQESGPGLVKPSETLSLTCTVSGGSISSYYWSWIRQPPGKGLEWIGYIYYSGSTNYNPSLKSRVTISVDTSKNQFSLKLSSVTAADTAVYYCARNWGYFDYWGQGTLVTVSS

SEQ ID NO: 32501 - protein, 120 aa, synthetic construct
  REGION 1..120: note = Description of Artificial Sequence: Synthetic polypeptide
EVQLVESGGGLVKPGGSLRLSCAASGFTFSNAWMSWVRQAPGKGLEWVGRIKSKTDGGTTDYAAPVKGRFTISRDDSKNTLYLQMNSLKTEDTAVYYCTTDYGDYYFDYWGQGTLVTVSS

SEQ ID NO: 32502 - protein, 107 aa, synthetic construct
  REGION 1..107: note = Description of Artificial Sequence: Synthetic polypeptide
QVQLVESGGGLVKPGGSLRLSCAASGFTFSDYYMSWIRQAPGKGLEWVSYISSSGSTIYYADSVKGRFTISRDNAKNSLYLQMNSLRAEDTAVYYCARVLRYFDWLL

SEQ ID NO: 32503 - protein, 15 aa, synthetic construct
  REGION 1..15: note = Description of Artificial Sequence: Synthetic peptide
YFDYWGQGTLVTVSS

SEQ ID NO: 32504 - protein, 117 aa, synthetic construct
  REGION 1..117: note = Description of Artificial Sequence: Synthetic polypeptide
QVQLQESGPGLVKPSETLSLTCTVSGGSISSYYWSWIRQPPGKGLEWIGYIYYSGSTNYNPSLKSRVTISVDTSKNQFSLKLSSVTAADTAVYYCARNWGAEYFQHWGQGTLVTVSS

SEQ ID NO: 32505 - protein, 123 aa, synthetic construct
  REGION 1..123: note = Description of Artificial Sequence: Synthetic polypeptide
QVQLQESGPGLVKPSETLSLTCTVSGGSISSYYWSWIRQPPGKGLEWIGYIYYSGSTNYNPSLKSRVTISVDTSKNQFSLKLSSVTAADTAVYYCAREYSSSSYYYYYGMDVWGQGTTVTVSS

SEQ ID NO: 32506 - protein, 121 aa, synthetic construct
  REGION 1..121: note = Description of Artificial Sequence: Synthetic polypeptide
QVQLVESGGGVVQPGRSLRLSCAASGFTFSSYGMHWVRQAPGKGLEWVAVISYDGSNKYYADSVKGRFTISRDNSKNTLYLQMNSLRAEDTAVYYCAKEYSSSSAEYFQHWGQGTLVTVSS

SEQ ID NO: 32507 - protein, 124 aa, synthetic construct
  REGION 1..124: note = Description of Artificial Sequence: Synthetic polypeptide
QVQLQESGPGLVKPSQTLSLTCTVSGGSISSGGYYWSWIRQHPGKGLEWIGYIYYSGSTYYNPSLKSRVTISVDTSKNQFSLKLSSVTAADTAVYYCARSIAARYYYYYGMDVWGQGTTVTVSS

SEQ ID NO: 32508 - protein, 120 aa, synthetic construct
  REGION 1..120: note = Description of Artificial Sequence: Synthetic polypeptide
QVQLVESGGGVVQPGRSLRLSCAASGFTFSSYGMHWVRQAPGKGLEWVAVIWYDGSNKYYADSVKGRFTISRDNSKNTLYLQMNSLRAEDTAVYYCARYSGSYYDAFDIWGQGTMVTVSS

SEQ ID NO: 32509 - protein, 118 aa, synthetic construct
  REGION 1..118: note = Description of Artificial Sequence: Synthetic polypeptide
EVQLVESGGGLVQPGGSLRLSCAASGFTFSSYSMNWVRQAPGKGLEWVSYISSSSSTIYYADSVKGRFTISRDNAKNSLYLQMNSLRDEDTAVYYCARDYGDYYFDYWGQGTLVTVSS

SEQ ID NO: 32510 - protein, 128 aa, synthetic construct
  REGION 1..128: note = Description of Artificial Sequence: Synthetic polypeptide
QVQLQESGPGLVKPSQTLSLTCTVSGGSISSGGYYWSWIRQHPGKGLEWIGYIYYSGSTYYNPSLKSRVTISVDTSKNQFSLKLSSVTAADTAVYYCARDIVLMVYAIYYYYYGMDVWGQGTTVTVSS

SEQ ID NO: 32511 - protein, 119 aa, synthetic construct
  REGION 1..119: note = Description of Artificial Sequence: Synthetic polypeptide
QVQLVESGGGVVQPGRSLRLSCAASGFTFSSYAMHWVRQAPGKGLEWVAVISYDGSNKYYADSVKGRFTISRDNSKNTLYLQMNSLRAEDTAVYYCARDYGDYNWFDPWGQGTLVTVSS

SEQ ID NO: 32512 - protein, 125 aa, synthetic construct
  REGION 1..125: note = Description of Artificial Sequence: Synthetic polypeptide
QVQLVESGGGVVQPGRSLRLSCAASGFTFSSYGMHWVRQAPGKGLEWVAVIWYDGSNKYYADSVKGRFTISRDNSKNTLYLQMNSLRAEDTAVYYCARGYSGYDYYYYYYGMDVWGQGTTVTVSS

SEQ ID NO: 32513 - protein, 125 aa, synthetic construct
  REGION 1..125: note = Description of Artificial Sequence: Synthetic polypeptide
QVQLQESGPGLVKPSQTLSLTCTVSGGSISSGGYYWSWIRQHPGKGLEWIGYIYYSGSTYYNPSLKSRVTISVDTSKNQFSLKLSSVTAADTAVYYCARGIAVAGYYYYYGMDVWGQGTTVTVSS

SEQ ID NO: 32514 - protein, 98 aa, synthetic construct; identical to SEQ ID NO: 32466
  REGION 1..98: note = Description of Artificial Sequence: Synthetic polypeptide

SEQ ID NO: 32515 - protein, 17 aa, synthetic construct
  REGION 1..17: note = Description of Artificial Sequence: Synthetic peptide
LGYFDYWGQGTLVTVSS

SEQ ID NO: 32516 - protein, 126 aa, synthetic construct
  REGION 1..126: note = Description of Artificial Sequence: Synthetic polypeptide
QVQLQQSGPGLVKPSQTLSLTCAISGDSVSSNSAAWNWIRQSPSRGLEWLGRTYYRSKWYNDYAVSVKSRITINPDTSKNQFSLQLNSVTPEDTAVYYCARAYCGGDCYSNWFDPWGQGTLVTVSS

SEQ ID NO: 32517 - protein, 123 aa, synthetic construct
  REGION 1..123: note = Description of Artificial Sequence: Synthetic polypeptide
QVQLVQSGAEVKKPGASVKVSCKASGYTFTGYYMHWVRQAPGQGLEWMGWINPNSGGTNYAQKFQGRVTMTRDTSISTAYMELSRLRSDDTAVYYCARDYGDYYYYYYGMDVWGQGTTVTVSS

SEQ ID NO: 32518 - protein, 128 aa, synthetic construct
  REGION 1..128: note = Description of Artificial Sequence: Synthetic polypeptide
QVQLVESGGGVVQPGRSLRLSCAASGFTFSSYGMHWVRQAPGKGLEWVAVIWYDGSNKYYADSVKGRFTISRDNSKNTLYLQMNSLRAEDTAVYYCARGYCSSTSCYTYYYYYGMDVWGQGTTVTVSS

SEQ ID NO: 32519 - protein, 127 aa, synthetic construct
  REGION 1..127: note = Description of Artificial Sequence: Synthetic polypeptide
EVQLLESGGGLVQPGGSLRLSCAASGFTFSSYAMSWVRQAPGKGLEWVSAISGSGGSTYYADSVKGRFTISRDNSKNTLYLQMNSLRAEDTAVYYCAKAYCGGDCYSYYYYYGMDVWGQGTTVTVSS

SEQ ID NO: 32520 - protein, 100 aa, synthetic construct; identical to SEQ ID NO: 32489
  REGION 1..100: note = Description of Artificial Sequence: Synthetic polypeptide

SEQ ID NO: 32521 - protein, 19 aa, synthetic construct
  REGION 1..19: note = Description of Artificial Sequence: Synthetic peptide
QQLVYFDYWGQGTLVTVSS

SEQ ID NO: 32522 - protein, 123 aa, synthetic construct
  REGION 1..123: note = Description of Artificial Sequence: Synthetic polypeptide
EVQLVESGGGLVKPGGSLRLSCAASGFTFSSYSMNWVRQAPGKGLEWVSSISSSSSYIYYADSVKGRFTISRDNAKNSLYLQMNSLRAEDTAVYYCARDYSNYYYYYYGMDVWGQGTTVTVSS

SEQ ID NO: 32523 - protein, 120 aa, synthetic construct
  REGION 1..120: note = Description of Artificial Sequence: Synthetic polypeptide
EVQLVESGGGLVKPGGSLRLSCAASGFTFSSYSMNWVRQAPGKGLEWVSSISSSSSYIYYADSVKGRFTISRDNAKNSLYLQMNSLRAEDTAVYYCARGYSYGYNWFDPWGQGTLVTVSS

SEQ ID NO: 32524 - protein, 119 aa, synthetic construct
  REGION 1..119: note = Description of Artificial Sequence: Synthetic polypeptide
QVQLVQSGAEVKKPGASVKVSCKASGYTFTGYYMHWVRQAPGQGLEWMGWINPNSGGTNYAQKFQGRVTMTRDTSISTAYMELSRLRSDDTAVYYCARGIVGATYFDYWGQGTLVTVSS

SEQ ID NO: 32525 - protein, 127 aa, synthetic construct
  REGION 1..127: note = Description of Artificial Sequence: Synthetic polypeptide
QVQLVESGGGVVQPGRSLRLSCAASGFTFSSYGMHWVRQAPGKGLEWVAVIWYDGSNKYYADSVKGRFTISRDNSKNTLYLQMNSLRAEDTAVYYCARAYCGGDCYSYYYYYGMDVWGQGTTVTVSS

SEQ ID NO: 32526 - protein, 119 aa, synthetic construct
  REGION 1..119: note = Description of Artificial Sequence: Synthetic polypeptide
QVQLQESGPGLVKPSQTLSLTCTVSGGSISSGGYYWSWIRQHPGKGLEWIGYIYYSGSTYYNPSLKSRVTISVDTSKNQFSLKLSSVTAADTAVYYCARDYGDYYFDYWGQGTLVTVSS

SEQ ID NO: 32527 - protein, 124 aa, synthetic construct
  REGION 1..124: note = Description of Artificial Sequence: Synthetic polypeptide
QVQLVESGGGVVQPGRSLRLSCAASGFTFSSYAMHWVRQAPGKGLEWVAVISYDGSNKYYADSVKGRFTISRDNSKNTLYLQMNSLRAEDTAVYYCARRDGYNYYYYYYGMDVWGQGTTVTVSS

SEQ ID NO: 32528 - protein, 108 aa, synthetic construct
  REGION 1..108: note = Description of Artificial Sequence: Synthetic polypeptide
QVQLQESGPGLVKPSETLSLTCTVSGGSVSSGSYYWSWIRQPPGKGLEWIGYIYYSGSTNYNPSLKSRVTISVDTSKNQFSLKLSSVTAADTAVYYCARVLRYFDWLL

SEQ ID NO: 32529 - protein, 15 aa, synthetic construct
  REGION 1..15: note = Description of Artificial Sequence: Synthetic peptide
YFDYWGQGTLVTVSS

SEQ ID NO: 32530 - protein, 118 aa, synthetic construct
  REGION 1..118: note = Description of Artificial Sequence: Synthetic polypeptide
QITLKESGPTLVKPTQTLTLTCTFSGFSLSTSGVGVGWIRQPPGKALEWLALIYWNDDKRYSPSLKSRLTITKDTSKNQVVLTMTNMDPVDTATYYCAHTTVTYFDYWGQGTLVTVSS

SEQ ID NO: 32531 - protein, 128 aa, synthetic construct
  REGION 1..128: note = Description of Artificial Sequence: Synthetic polypeptide
QVQLVQSGAEVKKPGASVKVSCKASGYTFTGYYMHWVRQAPGQGLEWMGWINPNSGGTNYAQKFQGRVTMTRDTSISTAYMELSRLRSDDTAVYYCARGYCSSTSCYTYYYYYGMDVWGQGTTVTVSS

SEQ ID NO: 32532 - protein, 125 aa, synthetic construct
  REGION 1..125: note = Description of Artificial Sequence: Synthetic polypeptide
EVQLLESGGGLVQPGGSLRLSCAASGFTFSSYAMSWVRQAPGKGLEWVSAISGSGGSTYYADSVKGRFTISRDNSKNTLYLQMNSLRAEDTAVYYCAKGYSGYDYYYYYYGMDVWGQGTTVTVSS

SEQ ID NO: 32533 - protein, 119 aa, synthetic construct
  REGION 1..119: note = Description of Artificial Sequence: Synthetic polypeptide
QLQLQESGPGLVKPSETLSLTCTVSGGSISSSSYYWGWIRQPPGKGLEWIGSIYYSGSTYYNPSLKSRVTISVDTSKNQFSLKLSSVTAADTAVYYCARDYGDYYFDYWGQGTLVTVSS

SEQ ID NO: 32534 - protein, 119 aa, synthetic construct
  REGION 1..119: note = Description of Artificial Sequence: Synthetic polypeptide
EVQLVESGGGLVKPGGSLRLSCAASGFTFSSYSMNWVRQAPGKGLEWVSSISSSSSYIYYADSVKGRFTISRDNAKNSLYLQMNSLRAEDTAVYYCARDYSNYDAFDIWGQGTMVTVSS

SEQ ID NO: 32535 - protein, 128 aa, synthetic construct
  REGION 1..128: note = Description of Artificial Sequence: Synthetic polypeptide
QVQLQQSGPGLVKPSQTLSLTCAISGDSVSSNSAAWNWIRQSPSRGLEWLGRTYYRSKWYNDYAVSVKSRITINPDTSKNQFSLQLNSVTPEDTAVYYCARGYSSGWYYYYYYGMDVWGQGTTVTVSS

SEQ ID NO: 32536 - protein, 131 aa, synthetic construct
  REGION 1..131: note = Description of Artificial Sequence: Synthetic polypeptide
QVQLQQSGPGLVKPSQTLSLTCAISGDSVSSNSAAWNWIRQSPSRGLEWLGRTYYRSKWYNDYAVSVKSRITINPDTSKNQFSLQLNSVTPEDTAVYYCARGYCSGGSCYSYYYYYGMDVWGQGTTVTVSS

SEQ ID NO: 32537 - protein, 120 aa, synthetic construct
  REGION 1..120: note = Description of Artificial Sequence: Synthetic polypeptide
QVQLVESGGGLVKPGGSLRLSCAASGFTFSDYYMSWIRQAPGKGLEWVSYISSSGSTIYYADSVKGRFTISRDNAKNSLYLQMNSLRAEDTAVYYCARYNWNDYWYFDLWGRGTLVTVSS

SEQ ID NO: 32538 - protein, 118 aa, synthetic construct
  REGION 1..118: note = Description of Artificial Sequence: Synthetic polypeptide
QVQLQESGPGLVKPSETLSLTCTVSGGSISSYYWSWIRQPPGKGLEWIGYIYYSGSTNYNPSLKSRVTISVDTSKNQFSLKLSSVTAADTAVYYCARYSGSYYYFDYWGQGTLVTVSS

SEQ ID NO: 32539 - protein, 121 aa, synthetic construct
  REGION 1..121: note = Description of Artificial Sequence: Synthetic polypeptide
EVQLLESGGGLVQPGGSLRLSCAASGFTFSSYAMSWVRQAPGKGLEWVSAISGSGGSTYYADSVKGRFTISRDNSKNTLYLQMNSLRAEDTAVYYCAKGIAAAGYWYFDLWGRGTLVTVSS

SEQ ID NO: 32540 - protein, 119 aa, synthetic construct
  REGION 1..119: note = Description of Artificial Sequence: Synthetic polypeptide
EVQLVESGGGLVKPGGSLRLSCAASGFTFSSYSMNWVRQAPGKGLEWVSSISSSSSYIYYADSVKGRFTISRDNAKNSLYLQMNSLRAEDTAVYYCARRDGYNYYFDYWGQGTLVTVSS

SEQ ID NO: 32541 - protein, 116 aa, synthetic construct
  REGION 1..116: note = Description of Artificial Sequence: Synthetic polypeptide
EVQLVESGGGLVQPGGSLRLSCAASGFTFSSYSMNWVRQAPGKGLEWVSYISSSSSTIYYADSVKGRFTISRDNAKNSLYLQMNSLRDEDTAVYYCARLTGYFDYWGQGTLVTVSS

SEQ ID NO: 32542 - protein, 118 aa, synthetic construct
  REGION 1..118: note = Description of Artificial Sequence: Synthetic polypeptide
QVQLVESGGGVVQPGRSLRLSCAASGFTFSSYAMHWVRQAPGKGLEWVAVISYDGSNKYYADSVKGRFTISRDNSKNTLYLQMNSLRAEDTAVYYCARDYSNYYFDYWGQGTLVTVSS

SEQ ID NO: 32543 - protein, 118 aa, synthetic construct
  REGION 1..118: note = Description of Artificial Sequence: Synthetic polypeptide
EVQLLESGGGLVQPGGSLRLSCAASGFTFSSYAMSWVRQAPGKGLEWVSAISGSGGSTYYADSVKGRFTISRDNSKNTLYLQMNSLRAEDTAVYYCAKGTTGTYFDYWGQGTLVTVSS

SEQ ID NO: 32544 - protein, 120 aa, synthetic construct
  REGION 1..120: note = Description of Artificial Sequence: Synthetic polypeptide
EVQLLESGGGLVQPGGSLRLSCAASGFTFSSYAMSWVRQAPGKGLEWVSAISGSGGSTYYADSVKGRFTISRDNSKNTLYLQMNSLRAEDTAVYYCAKEYSSSSDAFDIWGQGTMVTVSS

SEQ ID NO: 32545 - protein, 117 aa, synthetic construct
  REGION 1..117: note = Description of Artificial Sequence: Synthetic polypeptide
EVQLVESGGGLVKPGGSLRLSCAASGFTFSSYSMNWVRQAPGKGLEWVSSISSSSSYIYYADSVKGRFTISRDNAKNSLYLQMNSLRAEDTAVYYCARNWGNWFDPWGQGTLVTVSS

SEQ ID NO: 32546 - protein, 119 aa, synthetic construct
  REGION 1..119: note = Description of Artificial Sequence: Synthetic polypeptide
QVQLVESGGGVVQPGRSLRLSCAASGFTFSSYAMHWVRQAPGKGLEWVAVISYDGSNKYYADSVKGRFTISRDNSKNTLYLQMNSLRAEDTAVYYCARGTTGTNWFDPWGQGTLVTVSS

SEQ ID NO: 32547 - protein, 121 aa, synthetic construct
  REGION 1..121: note = Description of Artificial Sequence: Synthetic polypeptide
EVQLLESGGGLVQPGGSLRLSCAASGFTFSSYAMSWVRQAPGKGLEWVSAISGSGGSTYYADSVKGRFTISRDNSKNTLYLQMNSLRAEDTAVYYCAKGIAVAGAEYFQHWGQGTLVTVSS

SEQ ID NO: 32548 - protein, 122 aa, synthetic construct
  REGION 1..122: note = Description of Artificial Sequence: Synthetic polypeptide
QLQLQESGPGLVKPSETLSLTCTVSGGSISSSSYYWGWIRQPPGKGLEWIGSIYYSGSTYYNPSLKSRVTISVDTSKNQFSLKLSSVTAADTAVYYCARYSGSYYAEYFQHWGQGTLVTVSS

SEQ ID NO: 32549 - protein, 122 aa, synthetic construct
  REGION 1..122: note = Description of Artificial Sequence: Synthetic polypeptide
EVQLVESGGGLVKPGGSLRLSCAASGFTFSSYSMNWVRQAPGKGLEWVSSISSSSSYIYYADSVKGRFTISRDNAKNSLYLQMNSLRAEDTAVYYCARAYCGGDCYSYFDYWGQGTLVTVSS

SEQ ID NO: 32550 - protein, 124 aa, synthetic construct
  REGION 1..124: note = Description of Artificial Sequence: Synthetic polypeptide
QVQLVESGGGVVQPGRSLRLSCAASGFTFSSYGMHWVRQAPGKGLEWVAVIWYDGSNKYYADSVKGRFTISRDNSKNTLYLQMNSLRAEDTAVYYCARGIAVAGYYYYYGMDVWGQGTTVTVSS

SEQ ID NO: 32551 - protein, 98 aa, synthetic construct
  REGION 1..98: note = Description of Artificial Sequence: Synthetic polypeptide
EVQLVESGGGLVQPGGSLRLSCAASGFTFSSYSMNWVRQAPGKGLEWVSYISSSSSTIYYADSVKGRFTISRDNAKNSLYLQMNSLRDEDTAVYYCAR

SEQ ID NO: 32552 - protein, 17 aa, synthetic construct
  REGION 1..17: note = Description of Artificial Sequence: Synthetic peptide
LGYFDYWGQGTLVTVSS

SEQ ID NO: 32553 - protein, 118 aa, synthetic construct
  REGION 1..118: note = Description of Artificial Sequence: Synthetic polypeptide
QVQLQESGPGLVKPSETLSLTCTVSGGSISSYYWSWIRQPPGKGLEWIGYIYYSGSTNYNPSLKSRVTISVDTSKNQFSLKLSSVTAADTAVYYCARGTTGTNWFDPWGQGTLVTVSS

SEQ ID NO: 32554 - protein, 118 aa, synthetic construct
  REGION 1..118: note = Description of Artificial Sequence: Synthetic polypeptide
EVQLLESGGGLVQPGGSLRLSCAASGFTFSSYAMSWVRQAPGKGLEWVSAISGSGGSTYYADSVKGRFTISRDNSKNTLYLQMNSLRAEDTAVYYCAKSIAARYFDYWGQGTLVTVSS

SEQ ID NO: 32555 - protein, 119 aa, synthetic construct
  REGION 1..119: note = Description of Artificial Sequence: Synthetic polypeptide
EVQLLESGGGLVQPGGSLRLSCAASGFTFSSYAMSWVRQAPGKGLEWVSAISGSGGSTYYADSVKGRFTISRDNSKNTLYLQMNSLRAEDTAVYYCAKSIAARNWFDPWGQGTLVTVSS

SEQ ID NO: 32556 - protein, 120 aa, synthetic construct
  REGION 1..120: note = Description of Artificial Sequence: Synthetic polypeptide
EVQLLESGGGLVQPGGSLRLSCAASGFTFSSYAMSWVRQAPGKGLEWVSAISGSGGSTYYADSVKGRFTISRDNSKNTLYLQMNSLRAEDTAVYYCAKVQLERYWYFDLWGRGTLVTVSS

SEQ ID NO: 32557 - protein, 125 aa, synthetic construct
  REGION 1..125: note = Description of Artificial Sequence: Synthetic polypeptide
QVQLQESGPGLVKPSQTLSLTCTVSGGSISSGGYYWSWIRQHPGKGLEWIGYIYYSGSTYYNPSLKSRVTISVDTSKNQFSLKLSSVTAADTAVYYCARVDTAMVYYYYYGMDVWGQGTTVTVSS

SEQ ID NO: 32558 - protein, 124 aa, synthetic construct
  REGION 1..124: note = Description of Artificial Sequence: Synthetic polypeptide
EVQLLESGGGLVQPGGSLRLSCAASGFTFSSYAMSWVRQAPGKGLEWVSAISGSGGSTYYADSVKGRFTISRDNSKNTLYLQMNSLRAEDTAVYYCAKGYCSSTSCYTDAFDIWGQGTMVTVSS

SEQ ID NO: 32559 - protein, 120 aa, synthetic construct
  REGION 1..120: note = Description of Artificial Sequence: Synthetic polypeptide
EVQLVESGGGLVKPGGSLRLSCAASGFTFSNAWMSWVRQAPGKGLEWVGRIKSKTDGGTTDYAAPVKGRFTISRDDSKNTLYLQMNSLKTEDTAVYYCTTYNWNDYFDYWGQGTLVTVSS

SEQ ID NO: 32560 - protein, 117 aa, synthetic construct
  REGION 1..117: note = Description of Artificial Sequence: Synthetic polypeptide
EVQLVESGGGLVQPGGSLRLSCAASGFTFSSYSMNWVRQAPGKGLEWVSYISSSSSTIYYADSVKGRFTISRDNAKNSLYLQMNSLRDEDTAVYYCARTTVTYFDYWGQGTLVTVSS

SEQ ID NO: 32561 - protein, 119 aa, synthetic construct
  REGION 1..119: note = Description of Artificial Sequence: Synthetic polypeptide
EVQLLESGGGLVQPGGSLRLSCAASGFTFSSYAMSWVRQAPGKGLEWVSAISGSGGSTYYADSVKGRFTISRDNSKNTLYLQMNSLRAEDTAVYYCAKYSGSYYYFDYWGQGTLVTVSS

SEQ ID NO: 32562 - protein, 123 aa, synthetic construct
  REGION 1..123: note = Description of Artificial Sequence: Synthetic polypeptide
EVQLLESGGGLVQPGGSLRLSCAASGFTFSSYAMSWVRQAPGKGLEWVSAISGSGGSTYYADSVKGRFTISRDNSKNTLYLQMNSLRAEDTAVYYCAKITIFGVVIIDAFDIWGQGTMVTVSS

SEQ ID NO: 32563 - protein, 128 aa, synthetic construct
  REGION 1..128: note = Description of Artificial Sequence: Synthetic polypeptide
QVQLVESGGGVVQPGRSLRLSCAASGFTFSSYGMHWVRQAPGKGLEWVAVIWYDGSNKYYADSVKGRFTISRDNSKNTLYLQMNSLRAEDTAVYYCARYYYDSSGYYYYYYYYGMDVWGQGTTVTVSS

SEQ ID NO: 32564 - protein, 123 aa, synthetic construct
  REGION 1..123: note = Description of Artificial Sequence: Synthetic polypeptide
QVQLVQSGAEVKKPGASVKVSCKASGYTFTGYYMHWVRQAPGQGLEWMGWINPNSGGTNYAQKFQGRVTMTRDTSISTAYMELSRLRSDDTAVYYCARDYSNYYYYYYGMDVWGQGTTVTVSS

SEQ ID NO: 32565 - protein, 120 aa, synthetic construct
  REGION 1..120: note = Description of Artificial Sequence: Synthetic polypeptide
QVQLVQSGAEVKKPGASVKVSCKASGYTFTSYGISWVRQAPGQGLEWMGWISAYNGNTNYAQKLQGRVTMTTDTSTSTAYMELRSLRSDDTAVYYCARGYSGYDYYFDYWGQGTLVTVSS

SEQ ID NO: 32566 - protein, 120 aa, synthetic construct
  REGION 1..120: note = Description of Artificial Sequence: Synthetic polypeptide
QVQLVESGGGVVQPGRSLRLSCAASGFTFSSYGMHWVRQAPGKGLEWVAVIWYDGSNKYYADSVKGRFTISRDNSKNTLYLQMNSLRAEDTAVYYCAREYSSSSDAFDIWGQGTMVTVSS

SEQ ID NO: 32567 - protein, 122 aa, synthetic construct
  REGION 1..122: note = Description of Artificial Sequence: Synthetic polypeptide
EVQLVESGGGLVKPGGSLRLSCAASGFTFSSYSMNWVRQAPGKGLEWVSSISSSSSYIYYADSVKGRFTISRDNAKNSLYLQMNSLRAEDTAVYYCARTTVTYYYYYGMDVWGQGTTVTVSS

SEQ ID NO: 32568 - protein, 124 aa, synthetic construct
  REGION 1..124: note = Description of Artificial Sequence: Synthetic polypeptide
EVQLLESGGGLVQPGGSLRLSCAASGFTFSSYAMSWVRQAPGKGLEWVSAISGSGGSTYYADSVKGRFTISRDNSKNTLYLQMNSLRAEDTAVYYCAKGIAVAGYYYYYGMDVWGQGTTVTVSS

SEQ ID NO: 32569 - protein, 120 aa, synthetic construct
  REGION 1..120: note = Description of Artificial Sequence: Synthetic polypeptide
QVQLVESGGGVVQPGRSLRLSCAASGFTFSSYAMHWVRQAPGKGLEWVAVISYDGSNKYYADSVKGRFTISRDNSKNTLYLQMNSLRAEDTAVYYCARDYGGNSDAFDIWGQGTMVTVSS

SEQ ID NO: 32570 - protein, 124 aa, synthetic construct
  REGION 1..124: note = Description of Artificial Sequence: Synthetic polypeptide
QVQLVESGGGVVQPGRSLRLSCAASGFTFSSYAMHWVRQAPGKGLEWVAVISYDGSNKYYADSVKGRFTISRDNSKNTLYLQMNSLRAEDTAVYYCARDYGGNSYYYYYGMDVWGQGTTVTVSS

SEQ ID NO: 32571 - protein, 123 aa, synthetic construct
  REGION 1..123: note = Description of Artificial Sequence: Synthetic polypeptide
EVQLVESGGGLVKPGGSLRLSCAASGFTFSNAWMSWVRQAPGKGLEWVGRIKSKTDGGTTDYAAPVKGRFTISRDDSKNTLYLQMNSLKTEDTAVYYCTTLTGYYYYYGMDVWGQGTTVTVSS

SEQ ID NO: 32572 - protein, 118 aa, synthetic construct
  REGION 1..118: note = Description of Artificial Sequence: Synthetic polypeptide
EVQLLESGGGLVQPGGSLRLSCAASGFTFSSYAMSWVRQAPGKGLEWVSAISGSGGSTYYADSVKGRFTISRDNSKNTLYLQMNSLRAEDTAVYYCAKDYSNYYFDYWGQGTLVTVSS

SEQ ID NO: 32573 - protein, 121 aa, synthetic construct
  REGION 1..121: note = Description of Artificial Sequence: Synthetic polypeptide
QLQLQESGPGLVKPSETLSLTCTVSGGSISSSSYYWGWIRQPPGKGLEWIGSIYYSGSTYYNPSLKSRVTISVDTSKNQFSLKLSSVTAADTAVYYCARDYGDYAEYFQHWGQGTLVTVSS

SEQ ID NO: 32574 - protein, 118 aa, synthetic construct
  REGION 1..118: note = Description of Artificial Sequence: Synthetic polypeptide
QVQLQESGPGLVKPSETLSLTCTVSGGSISSYYWSWIRQPPGKGLEWIGYIYYSGSTNYNPSLKSRVTISVDTSKNQFSLKLSSVTAADTAVYYCAREYSSSSYFDYWGQGTLVTVSS

SEQ ID NO: 32575 - protein, 98 aa, synthetic construct; identical to SEQ ID NO: 32241
  REGION 1..98: note = Description of Artificial Sequence: Synthetic polypeptide

SEQ ID NO: 32576 - skipped

SEQ ID NO: 32577 - protein, 21 aa, synthetic construct
  REGION 1..21: note = Description of Artificial Sequence: Synthetic peptide
LYYYYYGMDVWGQGTTVTVSS

SEQ ID NO: 32578 - protein, 120 aa, synthetic construct
  REGION 1..120: note = Description of Artificial Sequence: Synthetic polypeptide
EVQLLESGGGLVQPGGSLRLSCAASGFTFSSYAMSWVRQAPGKGLEWVSAISGSGGSTYYADSVKGRFTISRDNSKNTLYLQMNSLRAEDTAVYYCAKSIAARYWYFDLWGRGTLVTVSS

SEQ ID NO: 32579 - protein, 118 aa, synthetic construct
  REGION 1..118: note = Description of Artificial Sequence: Synthetic polypeptide
EVQLVESGGGLVKPGGSLRLSCAASGFTFSSYSMNWVRQAPGKGLEWVSSISSSSSYIYYADSVKGRFTISRDNAKNSLYLQMNSLRAEDTAVYYCARYNWNDYFDYWGQGTLVTVSS

SEQ ID NO: 32580 - protein, 120 aa, synthetic construct
  REGION 1..120: note = Description of Artificial Sequence: Synthetic polypeptide
QLQLQESGPGLVKPSETLSLTCTVSGGSISSSSYYWGWIRQPPGKGLEWIGSIYYSGSTYYNPSLKSRVTISVDTSKNQFSLKLSSVTAADTAVYYCAREYSSSSYFDYWGQGTLVTVSS

SEQ ID NO: 32581 - protein, 127 aa, synthetic construct
  REGION 1..127: note = Description of Artificial Sequence: Synthetic polypeptide
QVQLVESGGGVVQPGRSLRLSCAASGFTFSSYAMHWVRQAPGKGLEWVAVISYDGSNKYYADSVKGRFTISRDNSKNTLYLQMNSLRAEDTAVYYCARDIVVVVAATYYYYYGMDVWGQGTTVTVSS

SEQ ID NO: 32582 - protein, 103 aa, synthetic construct; identical to SEQ ID NO: 32413
  REGION 1..103: note = Description of Artificial Sequence: Synthetic polypeptide

SEQ ID NO: 32583 - protein, 18 aa, synthetic construct
  REGION 1..18: note = Description of Artificial Sequence: Synthetic peptide
LLFYFDYWGQGTLVTVSS

SEQ ID NO: 32584 - protein, 98 aa, synthetic construct; identical to SEQ ID NO: 32241
  REGION 1..98: note = Description of Artificial Sequence: Synthetic polypeptide

SEQ ID NO: 32585 - protein, 18 aa, synthetic construct
  REGION 1..18: note = Description of Artificial Sequence: Synthetic peptide
LGDAFDIWGQGTMVTVSS

SEQ ID NO: 32586 - protein, 124 aa, synthetic construct
  REGION 1..124: note = Description of Artificial Sequence: Synthetic polypeptide
EVQLLESGGGLVQPGGSLRLSCAASGFTFSSYAMSWVRQAPGKGLEWVSAISGSGGSTYYADSVKGRFTISRDNSKNTLYLQMNSLRAEDTAVYYCAKDYGGNSYYYYYGMDVWGQGTTVTVSS

SEQ ID NO: 32587 - protein, 120 aa, synthetic construct
  REGION 1..120: note = Description of Artificial Sequence: Synthetic polypeptide
QITLKESGPTLVKPTQTLTLTCTFSGFSLSTSGVGVGWIRQPPGKALEWLALIYWNDDKRYSPSLKSRLTITKDTSKNQVVLTMTNMDPVDTATYYCAHGIAVAGYFDYWGQGTLVTVSS

SEQ ID NO: 32588 - protein, 98 aa, synthetic construct
  REGION 1..98: note = Description of Artificial Sequence: Synthetic polypeptide
QVQLVQSGAEVKKPGASVKVSCKASGYTFTSYDINWVRQATGQGLEWMGWMNPNSGNTGYAQKFQGRVTMTRNTSISTAYMELSSLRSEDTAVYYCAR

SEQ ID NO: 32589 - protein, 20 aa, synthetic construct
  REGION 1..20: note = Description of Artificial Sequence: Synthetic peptide
RWLQLYFDYWGQGTLVTVSS

SEQ ID NO: 32590 - protein, 120 aa, synthetic construct
  REGION 1..120: note = Description of Artificial Sequence: Synthetic polypeptide
QITLKESGPTLVKPTQTLTLTCTFSGFSLSTSGVGVGWIRQPPGKALEWLALIYWNDDKRYSPSLKSRLTITKDTSKNQVVLTMTNMDPVDTATYYCAHEYSSSSYFDYWGQGTLVTVSS

SEQ ID NO: 32591 - protein, 123 aa, synthetic construct
  REGION 1..123: note = Description of Artificial Sequence: Synthetic polypeptide
EVQLVESGGGLVKPGGSLRLSCAASGFTFSSYSMNWVRQAPGKGLEWVSSISSSSSYIYYADSVKGRFTISRDNAKNSLYLQMNSLRAEDTAVYYCARVQLERYYYYYGMDVWGQGTTVTVSS

SEQ ID NO: 32592 - protein, 118 aa, synthetic construct
  REGION 1..118: note = Description of Artificial Sequence: Synthetic polypeptide
EVQLVESGGGLVKPGGSLRLSCAASGFTFSSYSMNWVRQAPGKGLEWVSSISSSSSYIYYADSVKGRFTISRDNAKNSLYLQMNSLRAEDTAVYYCARTTVTNWFDPWGQGTLVTVSS

SEQ ID NO: 32593 - protein, 119 aa, synthetic construct
  REGION 1..119: note = Description of Artificial Sequence: Synthetic polypeptide
EVQLVESGGGLVKPGGSLRLSCAASGFTFSSYSMNWVRQAPGKGLEWVSSISSSSSYIYYADSVKGRFTISRDNAKNSLYLQMNSLRAEDTAVYYCARGTTGTDAFDIWGQGTMVTVSS

SEQ ID NO: 32594 - protein, 121 aa, synthetic construct
  REGION 1..121: note = Description of Artificial Sequence: Synthetic polypeptide
EVQLLESGGGLVQPGGSLRLSCAASGFTFSSYAMSWVRQAPGKGLEWVSAISGSGGSTYYADSVKGRFTISRDNSKNTLYLQMNSLRAEDTAVYYCAKVDIVATIDAFDIWGQGTMVTVSS

SEQ ID NO: 32595 - protein, 99 aa, synthetic construct; identical to SEQ ID NO: 32442
  REGION 1..99: note = Description of Artificial Sequence: Synthetic polypeptide

SEQ ID NO: 32596 - skipped

SEQ ID NO: 32597 - protein, 16 aa, synthetic construct
  REGION 1..16: note = Description of Artificial Sequence: Synthetic peptide
LYFDYWGQGTLVTVSS

SEQ ID NO: 32598 - protein, 128 aa, synthetic construct
  REGION 1..128: note = Description of Artificial Sequence: Synthetic polypeptide
QVQLVQSGAEVKKPGASVKVSCKASGYTFTSYDINWVRQATGQGLEWMGWMNPNSGNTGYAQKFQGRVTMTRNTSISTAYMELSSLRSEDTAVYYCARYYDILTGYYNYYYYYGMDVWGQGTTVTVSS

SEQ ID NO: 32599 - protein, 119 aa, synthetic construct; identical to SEQ ID NO: 32394
  REGION 1..119: note = Description of Artificial Sequence: Synthetic polypeptide

SEQ ID NO: 32600 - DNA, 22 bp, synthetic construct
  misc_feature 1..22: note = Description of Artificial Sequence: Synthetic primer
  source 1..22: mol_type = other DNA
ttcatctttcttcccacattgc

SEQ ID NO: 32601 - DNA, 20 bp, synthetic construct
  misc_feature 1..20: note = Description of Artificial Sequence: Synthetic primer
  source 1..20: mol_type = other DNA
gggcctgagagagacgttca

SEQ ID NO: 32602 - DNA, 23 bp, synthetic construct
  misc_feature 1..23: note = Description of Artificial Sequence: Synthetic primer
  source 1..23: mol_type = other DNA
cactcaggtccttctgctgtttc

SEQ ID NO: 32603 - DNA, 18 bp, synthetic construct
  misc_feature 1..18: note = Description of Artificial Sequence: Synthetic primer
  source 1..18: mol_type = other DNA
acctcgcctcctcctgct

SEQ ID NO: 32604 - DNA, 20 bp, synthetic construct
  misc_feature 1..20: note = Description of Artificial Sequence: Synthetic primer
  source 1..20: mol_type = other DNA
gccagccctatcatgaccaa

SEQ ID NO: 32605 - DNA, 20 bp, synthetic construct
  misc_feature 1..20: note = Description of Artificial Sequence: Synthetic primer
  source 1..20: mol_type = other DNA
gcaggtcgaggcattgaaga

SEQ ID NO: 32606 - DNA, 20 bp, synthetic construct
  misc_feature 1..20: note = Description of Artificial Sequence: Synthetic primer
  source 1..20: mol_type = other DNA
taatacgactcactataggg

SEQ ID NO: 32607 - DNA, 18 bp, synthetic construct
  misc_feature 1..18: note = Description of Artificial Sequence: Synthetic primer
  source 1..18: mol_type = other DNA
tagaaggcacagtcgagg

SEQ ID NO: 32608 - DNA, 23 bp, synthetic construct
  misc_feature 1..23: note = Description of Artificial Sequence: Synthetic primer
  source 1..23: mol_type = other DNA
gaggcaatgtgggaagaaagatg

SEQ ID NO: 32609 - DNA, 29 bp, synthetic construct
  misc_feature 1..29: note = Description of Artificial Sequence: Synthetic primer
  source 1..29: mol_type = other DNA
gaggcaatgtgggaagaaagatgaagtcg

SEQ ID NO: 32610 - DNA, 18 bp, synthetic construct
  misc_feature 1..18: note = Description of Artificial Sequence: Synthetic primer
  source 1..18: mol_type = other DNA
ctgggcctccgtgctcgc

SEQ ID NO: 32611 - DNA, 23 bp, synthetic construct
  misc_feature 1..23: note = Description of Artificial Sequence: Synthetic primer
  source 1..23: mol_type = other DNA
agaccttcagcatctggacaatg

SEQ ID NO: 32612 - DNA, 18 bp, synthetic construct
  misc_feature 1..18: note = Description of Artificial Sequence: Synthetic primer
  source 1..18: mol_type = other DNA
cgaggtccggagcagaga

SEQ ID NO: 32613 - DNA, 17 bp, synthetic construct
  misc_feature 1..17: note = Description of Artificial Sequence: Synthetic probe
  source 1..17: mol_type = other DNA
cagaaaagggccacctc

SEQ ID NO: 32614 - RNA, 19 nt, synthetic construct
  misc_feature 1..19: note = Description of Artificial Sequence: Synthetic oligonucleotide
  source 1..19: mol_type = other RNA
acttcacagcgagcacgga

SEQ ID NO: 32615 - RNA, 19 nt, synthetic construct
  misc_feature 1..19: note = Description of Artificial Sequence: Synthetic oligonucleotide
  source 1..19: mol_type = other RNA
gccaaggactttcaagata

SEQ ID NO: 32616 - RNA, 19 nt, synthetic construct
  misc_feature 1..19: note = Description of Artificial Sequence: Synthetic oligonucleotide
  source 1..19: mol_type = other RNA
tgacggaggtccaggcaat

SEQ ID NO: 32617 - RNA, 19 nt, synthetic construct
  misc_feature 1..19: note = Description of Artificial Sequence: Synthetic oligonucleotide
  source 1..19: mol_type = other RNA
agtgatggctcttggaaat

SEQ ID NO: 32618 - RNA, 19 nt, synthetic construct
  misc_feature 1..19: note = Description of Artificial Sequence: Synthetic oligonucleotide
  source 1..19: mol_type = other RNA
gactataggcacaactaca

SEQ ID NO: 32619 - RNA, 19 nt, synthetic construct
  misc_feature 1..19: note = Description of Artificial Sequence: Synthetic oligonucleotide
  source 1..19: mol_type = other RNA
ctgtgtgactgggtcccaa

SEQ ID NO: 32620 - RNA, 19 nt, synthetic construct
  misc_feature 1..19: note = Description of Artificial Sequence: Synthetic oligonucleotide
  source 1..19: mol_type = other RNA
cacctctggctaacccata

SEQ ID NO: 32621 - RNA, 19 nt, synthetic construct
  misc_feature 1..19: note = Description of Artificial Sequence: Synthetic oligonucleotide
  source 1..19: mol_type = other RNA
gagacaggcttccagaatt

SEQ ID NO: 32622 - RNA, 19 nt, synthetic construct
  misc_feature 1..19: note = Description of Artificial Sequence: Synthetic oligonucleotide
  source 1..19: mol_type = other RNA
tgaagttagtggagtcgaa

SEQ ID NO: 32623 - RNA, 19 nt, synthetic construct
  misc_feature 1..19: note = Description of Artificial Sequence: Synthetic oligonucleotide
  source 1..19: mol_type = other RNA
agatcactccagtttgcta

SEQ ID NO: 32624 - RNA, 19 nt, synthetic construct
  misc_feature 1..19: note = Description of Artificial Sequence: Synthetic oligonucleotide
  source 1..19: mol_type = other RNA
ccatcatgacaaaggatta

SEQ ID NO: 32625 - RNA, 19 nt, synthetic construct
  misc_feature 1..19: note = Description of Artificial Sequence: Synthetic oligonucleotide
  source 1..19: mol_type = other RNA
ggatggaactgattataga

SEQ ID NO: 32626 - RNA, 19 nt, synthetic construct
  misc_feature 1..19: note = Description of Artificial Sequence: Synthetic oligonucleotide
  source 1..19: mol_type = other RNA
ggaattgggccttcactca

SEQ ID NO: 32627 - RNA, 19 nt, synthetic construct
  misc_feature 1..19: note = Description of Artificial Sequence: Synthetic oligonucleotide
  source 1..19: mol_type = other RNA
gacggaacatcacccacta

SEQ ID NO: 32628 - RNA, 19 nt, synthetic construct
  misc_feature 1..19: note = Description of Artificial Sequence: Synthetic oligonucleotide
  source 1..19: mol_type = other RNA
ggataggtcttaccgacag

SEQ ID NO: 32629 - RNA, 19 nt, synthetic construct
  misc_feature 1..19: note = Description of Artificial Sequence: Synthetic oligonucleotide
  source 1..19: mol_type = other RNA
gcaggatcctaggatagaa

SEQ ID NO: 32630 - RNA, 19 nt, synthetic construct
  misc_feature 1..19: note = Description of Artificial Sequence: Synthetic oligonucleotide
  source 1..19: mol_type = other RNA
acattgctctttcacctga

SEQ ID NO: 32631 - RNA, 19 nt, synthetic construct
  misc_feature 1..19: note = Description of Artificial Sequence: Synthetic oligonucleotide
  source 1..19: mol_type = other RNA
gaagagtttcggaccctga

SEQ ID NO: 32632 - RNA, 19 nt, synthetic construct
  misc_feature 1..19: note = Description of Artificial Sequence: Synthetic oligonucleotide
  source 1..19: mol_type = other RNA
acttcacacgcagcacgga

SEQ ID NO: 32633 - RNA, 19 nt, synthetic construct
  misc_feature 1..19: note = Description of Artificial Sequence: Synthetic oligonucleotide
  source 1..19: mol_type = other RNA
gccaaggagaatcaagata

SEQ ID NO: 32634 - RNA, 19 nt, synthetic construct
  misc_feature 1..19: note = Description of Artificial Sequence: Synthetic oligonucleotide
  source 1..19: mol_type = other RNA
tgacggagcagcaggcaat

SEQ ID NO: 32635 - RNA, 19 nt, synthetic construct
  misc_feature 1..19: note = Description of Artificial Sequence: Synthetic oligonucleotide
  source 1..19: mol_type = other RNA
agtgatgggagttggaaat

SEQ ID NO: 32636 - RNA, 19 nt, synthetic construct
  misc_feature 1..19: note = Description of Artificial Sequence: Synthetic oligonucleotide
  source 1..19: mol_type = other RNA
gactatagcgtcaactaca

SEQ ID NO: 32637 - RNA, 19 nt, synthetic construct
  misc_feature 1..19: note = Description of Artificial Sequence: Synthetic oligonucleotide
  source 1..19: mol_type = other RNA
ctgtgtgagacggtcccaa

SEQ ID NO: 32638 - RNA, 19 nt, synthetic construct
  misc_feature 1..19: note = Description of Artificial Sequence: Synthetic oligonucleotide
  source 1..19: mol_type = other RNA
cacctctgcgaaacccata

SEQ ID NO: 32639 - RNA, 19 nt, synthetic construct
  misc_feature 1..19: note = Description of Artificial Sequence: Synthetic oligonucleotide
  source 1..19: mol_type = other RNA
gagacagggaaccagaatt

SEQ ID NO: 32640 - RNA, 19 nt, synthetic construct
  misc_feature 1..19: note = Description of Artificial Sequence: Synthetic oligonucleotide
  source 1..19: mol_type = other RNA
tgaagttacacgagtcgaa

SEQ ID NO: 32641 - RNA, 19 nt, synthetic construct
  misc_feature 1..19: note = Description of Artificial Sequence: Synthetic oligonucleotide
  source 1..19: mol_type = other RNA
agatcactggtgtttgcta

SEQ ID NO: 32642 - RNA, 19 nt, synthetic construct
  misc_feature 1..19: note = Description of Artificial Sequence: Synthetic oligonucleotide
  source 1..19: mol_type = other RNA
ccatcatgtgtaaggatta

SEQ ID NO: 32643 - RNA, 19 nt, synthetic construct
  misc_feature 1..19: note = Description of Artificial Sequence: Synthetic oligonucleotide
  source 1..19: mol_type = other RNA
ggatggaagacattataga

SEQ ID NO: 32644 - RNA, 19 nt, synthetic construct
  misc_feature 1..19: note = Description of Artificial Sequence: Synthetic oligonucleotide
  source 1..19: mol_type = other RNA
ggaattggcggttcactca

SEQ ID NO: 32645 - RNA, 19 nt, synthetic construct
  misc_feature 1..19: note = Description of Artificial Sequence: Synthetic oligonucleotide
  source 1..19: mol_type = other RNA
gacggaactagacccacta

SEQ ID NO: 32646 - RNA, 19 nt, synthetic construct
  misc_feature 1..19: note = Description of Artificial Sequence: Synthetic oligonucleotide
  source 1..19: mol_type = other RNA
ggataggtgaaaccgacag

SEQ ID NO: 32647 - RNA, 19 nt, synthetic construct
  misc_feature 1..19: note = Description of Artificial Sequence: Synthetic oligonucleotide
  source 1..19: mol_type = other RNA
gcaggatcgatggatagaa

SEQ ID NO: 32648 - RNA, 19 nt, synthetic construct
  misc_feature 1..19: note = Description of Artificial Sequence: Synthetic oligonucleotide
  source 1..19: mol_type = other RNA
acattgctgaatcacctga

SEQ ID NO: 32649 - RNA, 19 nt, synthetic construct
  misc_feature 1..19: note = Description of Artificial Sequence: Synthetic oligonucleotide
  source 1..19: mol_type = other RNA
gaagagttagcgaccctga

SEQ ID NO: 32650 - protein, 230 aa, synthetic construct
  REGION 1..230: note = Description of Artificial Sequence: Synthetic polypeptide
QVQLVQSGTEVKKPGASVKVSCKASGYTFTNYDINWVRQATGQGLEWMGWMHPNSGNTGYAQKFQGRVTLTRDTSISTAYMELSSLRSEDTAVYYCASSSGWYYFDYWGQGTLVTVSSASTKGPSVFPLAPSSKSTSGGTAALGCLVKDYFPEPVTVSWNSGALTSGVHTFPAVLQSSGLYSLSSVVTVPSSSLGTQTYICNVNHKPSNTKVDKKVEPKSCGSDEVDGGD

SEQ ID NO: 32651 - protein, 220 aa, synthetic construct
  REGION 1..220: note = Description of Artificial Sequence: Synthetic polypeptide
DIVMTQSPDSLAVSLGERATINCKSSQSILHSSNNNNYLAWFQQKPGQPPKLLLYWASTRESGVPDRFSGSGSGTDFTLTISSLQPEDVAVYYCQQYYNTPVTFGPGTKVGIKRTVAAPSVFIFPPSDEQLKSGTASVVCLLNNFYPREAKVQWKVDNALQSGNSQESVTEQDSKDSTYSLSSTLTLSKADYEKHKVYACEVTHQGLSSPVTKSFNRGEC

SEQ ID NO: 32652 - protein, 461 aa, synthetic construct
  REGION 1..461: note = Description of Artificial Sequence: Synthetic polypeptide
QVQLVESGGGVVQPGRSLRLSCAASGFTFSSFGMHWVRQAPGKGLEWVAIIWHDGSNKYYADSVKGRFTISRDNSNNTLYLQMSSLRAEDTAVYYCARDLSMGGMDVWGQGTTVTVSSASTKGPSVFPLAPSSKSTSGGTAALGCLVKDYFPEPVTVSWNSGALTSGVHTFPAVLQSSGLYSLSSVVTVPSSSLGTQTYICNVNHKPSNTKVDKKVEPKSCGSDEVDGGDKTHTCPPCPAPELLGGPSVFLFPPKPKDTLMISRTPEVTCVVVDVSHEDPEVKFNWYVDGVEVHNAKTKPREEQYNSTYRVVSVLTVLHQDWLNGKEYKCKVSNKALPAPIEKTISKAKGQPREPQVYTLPPSREEMTKNQVSLTCLVKGFYPSDIAVEWESNGQPENNYKTTPPVLDSDGSFFLYSKLTVDKSRWQQGNVFSCSVMHEALHNHYTQKSLSLSPGHHHHHH

SEQ ID NO: 32653 - protein, 214 aa, synthetic construct
  REGION 1..214: note = Description of Artificial Sequence: Synthetic polypeptide
DIQMTQSPSSLSASVGDRVTIACRASQNIISYLNWYQQKPGKAPKFLIYTASSLQSGVPSRFSGSGSGTDFTLTISSLQPEDFAIYYCQQTYSTPLTFGGGTKVEIKRTVAAPSVFIFPPSDEQLKSGTASVVCLLNNFYPREAKVQWKVDNALQSGNSQESVTEQDSKDSTYSLSSTLTLSKADYEKHKVYACEVTHQGLSSPVTKSFNRGEC

SEQ ID NO: 32654 - protein, 227 aa, synthetic construct
  REGION 1..227: note = Description of Artificial Sequence: Synthetic polypeptide
QVQLVESGGGVVQPGRSLRLSCAASGFTFSSFGMHWVRQAPGKGLEWVAIIWHDGSNKYYADSVKGRFTISRDNSNNTLYLQMSSLRAEDTAVYYCARDLSMGGMDVWGQGTTVTVSSASTKGPSVFPLAPSSKSTSGGTAALGCLVKDYFPEPVTVSWNSGALTSGVHTFPAVLQSSGLYSLSSVVTVPSSSLGTQTYICNVNHKPSNTKVDKKVEPKSCGSDEVD

SEQ ID NO: 32655 - protein, 214 aa, synthetic construct; identical to SEQ ID NO: 32653
  REGION 1..214: note = Description of Artificial Sequence: Synthetic polypeptide

SEQ ID NO: 32656 - protein, 460 aa, synthetic construct
  REGION 1..460: note = Description of Artificial Sequence: Synthetic polypeptide
QVQLVQSGAEVKKPGASVKVSCKASGYTFTDYYLHWVRQAPGQGLEWMGWIHPNSGGTNYAQKFQGRVTMTRDTSISTAYMGLSSLRSDDTAVYYCARDGTSSFDYWGQGTLVTVSSASTKGPSVFPLAPSSKSTSGGTAALGCLVKDYFPEPVTVSWNSGALTSGVHTFPAVLQSSGLYSLSSVVTVPSSSLGTQTYICNVNHKPSNTKVDKKVEPKSCGSDEVDGGDKTHTCPPCPAPELLGGPSVFLFPPKPKDTLMISRTPEVTCVVVDVSHEDPEVKFNWYVDGVEVHNAKTKPREEQYNSTYRVVSVLTVLHQDWLNGKEYKCKVSNKALPAPIEKTISKAKGQPREPQVYTLPPSREEMTKNQVSLTCLVKGFYPSDIAVEWESNGQPENNYKTTPPVLDSDGSFFLYSKLTVDKSRWQQGNVFSCSVMHEALHNHYTQKSLSLSPGHHHHHH

SEQ ID NO: 32657 - protein, 214 aa, synthetic construct
  REGION 1..214: note = Description of Artificial Sequence: Synthetic polypeptide
DIQMTQSPSSVSASVGDRVTITCRASQGISRWLAWYQQKPGKAPKLLIYGASSLQSGVPSRFSGSGSGTDFTLTISSLQPEDFAIYYCQQANSFPFTFGPGTKVDIKGTVAAPSVFIFPPSDEQLKSGTASVVCLLNNFYPREAKVQWKVDNALQSGNSQESVTEQDSKDSTYSLSSTLTLSKADYEKHKVYACEVTHQGLSSPVTKSFNRGEC

SEQ ID NO: 32658 - protein, 226 aa, synthetic construct
  REGION 1..226: note = Description of Artificial Sequence: Synthetic polypeptide
QVQLVQSGAEVKKPGASVKVSCKASGYTFTDYYLHWVRQAPGQGLEWMGWIHPNSGGTNYAQKFQGRVTMTRDTSISTAYMGLSSLRSDDTAVYYCARDGTSSFDYWGQGTLVTVSSASTKGPSVFPLAPSSKSTSGGTAALGCLVKDYFPEPVTVSWNSGALTSGVHTFPAVLQSSGLYSLSSVVTVPSSSLGTQTYICNVNHKPSNTKVDKKVEPKSCGSDEVD

SEQ ID NO: 32659 - protein, 214 aa, synthetic construct; identical to SEQ ID NO: 32657
  REGION 1..214: note = Description of Artificial Sequence: Synthetic polypeptide

SEQ ID NO: 32660 - protein, 460 aa, synthetic construct
  REGION 1..460: note = Description of Artificial Sequence: Synthetic polypeptide
EVQLVESGGGLVKPGGSLRLSCAASGFTFSSYSMNWVRQAPGKGLEWVSSISGSSSYIYYADSVKGRFTISRDNAKNSLYLQMNSLRAEDTAVYFCARGGSRGFDPWGQGTLVTVSSASTKGPSVFPLAPSSKSTSGGTAALGCLVKDYFPEPVTVSWNSGALTSGVHTFPAVLQSSGLYSLSSVVTVPSSSLGTQTYICNVNHKPSNTKVDKKVEPKSCGSDEVDGGDKTHTCPPCPAPELLGGPSVFLFPPKPKDTLMISRTPEVTCVVVDVSHEDPEVKFNWYVDGVEVHNAKTKPREEQYNSTYRVVSVLTVLHQDWLNGKEYKCKVSNKALPAPIEKTISKAKGQPREPQVYTLPPSREEMTKNQVSLTCLVKGFYPSDIAVEWESNGQPENNYKTTPPVLDSDGSFFLYSKLTVDKSRWQQGNVFSCSVMHEALHNHYTQKSLSLSPGHHHHHH

SEQ ID NO: 32661 - protein, 214 aa, synthetic construct
  REGION 1..214: note = Description of Artificial Sequence: Synthetic polypeptide
DIQMTQSPSSLSASVGDRVTITCRASQSITSYLNWYQQKPGKAPKLLIYTASSLQSGVPSRFSGSGSGTDFTLTISSLQPEDFATYYCQQSHSFPFTFGPGTKVDIKRTVAAPSVFIFPPSDEQLKSGTASVVCLLNNFYPREAKVQWKVDNALQSGNSQESVTEQDSKDSTYSLSSTLTLSKADYEKHKVYACEVTHQGLSSPVTKSFNRGEC

SEQ ID NO: 32662 - protein, 226 aa, synthetic construct
  REGION 1..226: note = Description of Artificial Sequence: Synthetic polypeptide
EVQLVESGGGLVKPGGSLRLSCAASGFTFSSYSMNWVRQAPGKGLEWVSSISGSSSYIYYADSVKGRFTISRDNAKNSLYLQMNSLRAEDTAVYFCARGGSRGFDPWGQGTLVTVSSASTKGPSVFPLAPSSKSTSGGTAALGCLVKDYFPEPVTVSWNSGALTSGVHTFPAVLQSSGLYSLSSVVTVPSSSLGTQTYICNVNHKPSNTKVDKKVEPKSCGSDEVD

SEQ ID NO: 32663 - protein, 214 aa, synthetic construct; identical to SEQ ID NO: 32661
  REGION 1..214: note = Description of Artificial Sequence: Synthetic polypeptide

SEQ ID NO: 32664 - protein, 459 aa, synthetic construct
  REGION 1..459: note = Description of Artificial Sequence: Synthetic polypeptide
QVQLVQSGTEVKKPGASLKVSCKASGYTFTVYYLNWVRQAPGQGLEWMGWINPNSGGTNYAQKFQGRVTMTRDTSISTAYMELSRLRSDDTAVYYCARGYDILTGWGQGTLVTVSSASTKGPSVFPLAPSSKSTSGGTAALGCLVKDYFPEPVTVSWNSGALTSGVHTFPAVLQSSGLYSLSSVVTVPSSSLGTQTYICNVNHKPSNTKVDKKVEPKSCGSDEVDGGDKTHTCPPCPAPELLGGPSVFLFPPKPKDTLMISRTPEVTCVVVDVSHEDPEVKFNWYVDGVEVHNAKTKPREEQYNSTYRVVSVLTVLHQDWLNGKEYKCKVSNKALPAPIEKTISKAKGQPREPQVYTLPPSREEMTKNQVSLTCLVKGFYPSDIAVEWESNGQPENNYKTTPPVLDSDGSFFLYSKLTVDKSRWQQGNVFSCSVMHEALHNHYTQKSLSLSPGHHHHHH

SEQ ID NO: 32665 - protein, 215 aa, synthetic construct
  REGION 1..215: note = Description of Artificial Sequence: Synthetic polypeptide
EIVLTQSPGTLSLSPGERATLSCRASRGVSNIYLAWYQQKPGQAPRLLIYGASNRATGIPDRFSGSGSGTDFTLTISRLEPEDFAVYYCQHNDYSMFTFGPGTKVDIKRTVAAPSVFIFPPSDEQLKSGTASVVCLLNNFYPREAKVQWKVDNALQSGNSQESVTEQDSKDSTYSLSSTLTLSKADYEKHKVYACEVTHQGLSSPVTKSFNRGEC

SEQ ID NO: 32666 - protein, 225 aa, synthetic construct
  REGION 1..225: note = Description of Artificial Sequence: Synthetic polypeptide
QVQLVQSGTEVKKPGASLKVSCKASGYTFTVYYLNWVRQAPGQGLEWMGWINPNSGGTNYAQKFQGRVTMTRDTSISTAYMELSRLRSDDTAVYYCARGYDILTGWGQGTLVTVSSASTKGPSVFPLAPSSKSTSGGTAALGCLVKDYFPEPVTVSWNSGALTSGVHTFPAVLQSSGLYSLSSVVTVPSSSLGTQTYICNVNHKPSNTKVDKKVEPKSCGSDEVD

SEQ ID NO: 32667 - protein, 215 aa, synthetic construct; identical to SEQ ID NO: 32665
  REGION 1..215: note = Description of Artificial Sequence: Synthetic polypeptide

SEQ ID NO: 32668 - protein, 465 aa, synthetic construct
  REGION 1..465: note = Description of Artificial Sequence: Synthetic polypeptide
QVQLVQSGAEVKKPGASVKVSCKASGYTFNSYGISWVRLAPGQGLEWMGWISAYNGNTKNAQKLQGRVTMTTDTSTSTAYMELRSLRSDDTAVYYCARHDFWSGYYKGMDVWGQGTTVTVSSASTKGPSVFPLAPSSKSTSGGTAALGCLVKDYFPEPVTVSWNSGALTSGVHTFPAVLQSSGLYSLSSVVTVPSSSLGTQTYICNVNHKPSNTKVDKKVEPKSCGSDEVDGGDKTHTCPPCPAPELLGGPSVFLFPPKPKDTLMISRTPEVTCVVVDVSHEDPEVKFNWYVDGVEVHNAKTKPREEQYNSTYRVVSVLTVLHQDWLNGKEYKCKVSNKALPAPIEKTISKAKGQPREPQVYTLPPSREEMTKNQVSLTCLVKGFYPSDIAVEWESNGQPENNYKTTPPVLDSDGSFFLYSKLTVDKSRWQQGNVFSCSVMHEALHNHYTQKSLSLSPGHHHHHH

SEQ ID NO: 32669 - protein, 216 aa, synthetic construct
  REGION 1..216: note = Description of Artificial Sequence: Synthetic polypeptide
QSVLTQPPSASGTPGQRVTISCSGSNSNIGNNIVTWYQQLPGTAPKLLIYVNDQRPSGVPDRFSGSKSGTSASLAISGLQSEDEADYYCAAWDDSLNGWVFGGGTTLTVLGQPKAAPSVTLFPPSSEELQANKATLVCLISDFYPGAVTVAWKADSSPVKAGVETTTPSKQSNNKYAASSYLSLTPEQWKSHRSYSCQVTHEGSTVEKTVAPTECS

SEQ ID NO: 32670 - protein, 231 aa, synthetic construct
  REGION 1..231: note = Description of Artificial Sequence: Synthetic polypeptide
QVQLVQSGAEVKKPGASVKVSCKASGYTFNSYGISWVRLAPGQGLEWMGWISAYNGNTKNAQKLQGRVTMTTDTSTSTAYMELRSLRSDDTAVYYCARHDFWSGYYKGMDVWGQGTTVTVSSASTKGPSVFPLAPSSKSTSGGTAALGCLVKDYFPEPVTVSWNSGALTSGVHTFPAVLQSSGLYSLSSVVTVPSSSLGTQTYICNVNHKPSNTKVDKKVEPKSCGSDEVD

SEQ ID NO: 32671 - protein, 216 aa, synthetic construct; identical to SEQ ID NO: 32669
  REGION 1..216: note = Description of Artificial Sequence: Synthetic polypeptide

SEQ ID NO: 32672 - protein, 462 aa, synthetic construct
  REGION 1..462: note = Description of Artificial Sequence: Synthetic polypeptide
QVQLVESGGGVVQPGRSLRLSCAASGFTFSSYGLHWVRQAPGKGLEWVAVIWYDGSNKYYADSVKGRFTISRDNSKNTLYLQMNSLRVEDTAVYYCANWYYYYYGMDVWGQGTTVTVSSASTKGPSVFPLAPSSKSTSGGTAALGCLVKDYFPEPVTVSWNSGALTSGVHTFPAVLQSSGLYSLSSVVTVPSSSLGTQTYICNVNHKPSNTKVDKKVEPKSCGSDEVDGGDKTHTCPPCPAPELLGGPSVFLFPPKPKDTLMISRTPEVTCVVVDVSHEDPEVKFNWYVDGVEVHNAKTKPREEQYNSTYRVVSVLTVLHQDWLNGKEYKCKVSNKALPAPIEKTISKAKGQPREPQVYTLPPSREEMTKNQVSLTCLVKGFYPSDIAVEWESNGQPENNYKTTPPVLDSDGSFFLYSKLTVDKSRWQQGNVFSCSVMHEALHNHYTQKSLSLSPGHHHHHH

SEQ ID NO: 32673 - protein, 216 aa, synthetic construct
  REGION 1..216: note = Description of Artificial Sequence: Synthetic polypeptide
QSVLTQPPSVSAAPGQKVTISCSGSSSNIGNNYVSWYQQLPGTAPKLLLYDSNKRPSGIPARFSGSKSGTSATLGITGLQTGDEADYYCGTWDSSLNTVVFGGGTKLTVLSQPKAAPSVTLFPPSSEELQANKATLVCLISDFYPGAVTVAWKADSSPVKAGVETTTPSKQSNNKYAASSYLSLTPEQWKSHRSYSCQVTHEGSTVEKTVAPTECS

SEQ ID NO: 32674 - protein, 228 aa, synthetic construct
  REGION 1..228: note = Description of Artificial Sequence: Synthetic polypeptide
QVQLVESGGGVVQPGRSLRLSCAASGFTFSSYGLHWVRQAPGKGLEWVAVIWYDGSNKYYADSVKGRFTISRDNSKNTLYLQMNSLRVEDTAVYYCANWYYYYYGMDVWGQGTTVTVSSASTKGPSVFPLAPSSKSTSGGTAALGCLVKDYFPEPVTVSWNSGALTSGVHTFPAVLQSSGLYSLSSVVTVPSSSLGTQTYICNVNHKPSNTKVDKKVEPKSCGSDEVD

SEQ ID NO: 32675 - protein, 464 aa, synthetic construct
  REGION 1..464: note = Description of Artificial Sequence: Synthetic polypeptide
QVQLVESGGGVVQPGRSLRLSCAASGFTFSSYGMHWVRQAPGKGLEWVAIIWYDGSYKYYADSVKGRFTISRDNSKNTLYLQMSSLRAEDTAVYYCARDAHDFWSGYFAYWGQGALVTVSSASTKGPSVFPLAPSSKSTSGGTAALGCLVKDYFPEPVTVSWNSGALTSGVHTFPAVLQSSGLYSLSSVVTVPSSSLGTQTYICNVNHKPSNTKVDKKVEPKSCGSDEVDGGDKTHTCPPCPAPELLGGPSVFLFPPKPKDTLMISRTPEVTCVVVDVSHEDPEVKFNWYVDGVEVHNAKTKPREEQYNSTYRVVSVLTVLHQDWLNGKEYKCKVSNKALPAPIEKTISKAKGQPREPQVYTLPPSREEMTKNQVSLTCLVKGFYPSDIAVEWESNGQPENNYKTTPPVLDSDGSFFLYSKLTVDKSRWQQGNVFSCSVMHEALHNHYTQKSLSLSPGHHHHHH

SEQ ID NO: 32676 - protein, 219 aa, synthetic construct
  REGION 1..219: note = Description of Artificial Sequence: Synthetic polypeptide
DIVMTQTPLSLSVTPGQPASISCKSSQSLLHGDGKTYLYWYLQKPGQPPQLLIYEVSNRFSGVPDRFSGSGSGTDFTLKISRVEAEDVGIYYCMQSIQIPWTFGQGTRVEIKRTVAAPSVFIFPPSDEQLKSGTASVVCLLNNFYPREAKVQWKVDNALQSGNSQESVTEQDSKDSTYSLSSTLTLSKADYEKHKVYACEVTHQGLSSPVTKSFNRGEC

SEQ ID NO: 32677 - protein, 230 aa, synthetic construct
  REGION 1..230: note = Description of Artificial Sequence: Synthetic polypeptide
QVQLVESGGGVVQPGRSLRLSCAASGFTFSSYGMHWVRQAPGKGLEWVAIIWYDGSYKYYADSVKGRFTISRDNSKNTLYLQMSSLRAEDTAVYYCARDAHDFWSGYFAYWGQGALVTVSSASTKGPSVFPLAPSSKSTSGGTAALGCLVKDYFPEPVTVSWNSGALTSGVHTFPAVLQSSGLYSLSSVVTVPSSSLGTQTYICNVNHKPSNTKVDKKVEPKSCGSDEVD

SEQ ID NO: 32678 - protein, 219 aa, synthetic construct
  REGION 1..219: note = Description of Artificial Sequence: Synthetic polypeptide
QVQLQQWGAGLLKPSETLSLTCAVSGGSFRYYYWSWIRQPPGKGLEWFGEINHAGSTNYNPSLKSRVTISIDTSKNQFSLKLRSVTAADTAVYYCARDYGAFDIWGQGTMVTVSSASTKGPSVFPLAPSSKSTSGGTAALGCLVKDYFPEPVTVSWNSGALTSGVHTFPAVLQSSGLYSLSSVVTVPSSSLGTQTYICNVNHKPSNTKVDKKVEPKSCG

SEQ ID NO: 32679 - protein, 215 aa, synthetic construct
  REGION 1..215: note = Description of Artificial Sequence: Synthetic polypeptide
EIVLTQSPGTLSLSPGERATLSCRASPSVNSGYLAWYQQKPGQTPRLLIFGASSRATGIPDRFSASGSGADFTLTISRLEPEDFAVYFCQQYESSPWTFGQGTKVEIKRTVAAPSVFIFPPSDEQLKSGTASVVCLLNNFYPREAKVQWKVDNALQSGNSQESVTEQDSKDSTYSLSSTLTLSKADYEKHKVYACEVTHQGLSSPVTKSFNRGEC

SEQ ID NO: 32680 - protein, 224 aa, synthetic construct
  REGION 1..224: note = Description of Artificial Sequence: Synthetic polypeptide
QVQLQQWGAGLLKPSETLSLTCAVSGGSFRYYYWSWIRQPPGKGLEWFGEINHAGSTNYNPSLKSRVTISIDTSKNQFSLKLRSVTAADTAVYYCARDYGAFDIWGQGTMVTVSSASTKGPSVFPLAPSSKSTSGGTAALGCLVKDYFPEPVTVSWNSGALTSGVHTFPAVLQSSGLYSLSSVVTVPSSSLGTQTYICNVNHKPSNTKVDKKVEPKSCGSDEVD

SEQ ID NO: 32681 - protein, 106 aa, synthetic construct
  REGION 1..106: note = Description of Artificial Sequence: Synthetic polypeptide
GQPKANPTVTLFPPSSEELQANKATLVCLISDFYPGAVTVAWKADGSPVKAGVETTKPSKQSNNKYAASSYLSLTPEQWKSHRSYSCQVTHEGSTVEKTVAPTECS

SEQ ID NO: 32682 - protein, 106 aa, synthetic construct
  REGION 1..106: note = Description of Artificial Sequence: Synthetic polypeptide
GQPKAAPSVTLFPPSSEELQANKATLVCLISDFYPGAVTVAWKADSSPVKAGVETTTPSKQSNNKYAASSYLSLTPEQWKSHRSYSCQVTHEGSTVEKTVAPTECS

SEQ ID NO: 32683 - protein, 105 aa, synthetic construct
  REGION 1..105: note = Description of Artificial Sequence: Synthetic polypeptide
QPKAAPSVTLFPPSSEELQANKATLVCLISDFYPGAVTVAWKADSSPVKAGVETTTPSKQSNNKYAASSYLSLTPEQWKSHRSYSCQVTHEGSTVEKTVAPTECS

SEQ ID NO: 32684 - protein, 106 aa, synthetic construct
  REGION 1..106: note = Description of Artificial Sequence: Synthetic polypeptide
GQPKAAPSVTLFPPSSEELQANKATLVCLISDFYPGAVTVAWKADSSPVKAGVETTTPSKQSNNKYAASSYLSLTPEQWKSHKSYSCQVTHEGSTVEKTVAPTECS

SEQ ID NO: 32685 - protein, 106 aa, synthetic construct
  REGION 1..106: note = Description of Artificial Sequence: Synthetic polypeptide
GQPKAAPSVTLFPPSSEELQANKATLVCLVSDFYPGAVTVAWKADGSPVKVGVETTKPSKQSNNKYAASSYLSLTPEQWKSHRSYSCRVTHEGSTVEKTVAPAECS

SEQ ID NO: 32686 - protein, 106 aa, Homo sapiens
TVAAPSVFIFPPSDEQLKSGTASVVCLLNNFYPREAKVQWKVDNALQSGNSQESVTEQDSKDSTYSLSSTLTLSKADYEKHKVYACEVTHQGLSSPVTKSFNRGEC

SEQ ID NO: 32687 - protein, 107 aa, Homo sapiens [sequence omitted]

SEQ ID NO: 32688 - protein, 330 aa, Homo sapiens
ASTKGPSVFPLAPSSKSTSGGTAALGCLVKDYFPEPVTVSWNSGALTSGVHTFPAVLQSSGLYSLSSVVTVPSSSLGTQTYICNVNHKPSNTKVDKKVEPKSCDKTHTCPPCPAPELLGGPSVFLFPPKPKDTLMISRTPEVTCVVVDVSHEDPEVKFNWYVDGVEVHNAKTKPREEQYNSTYRVVSVLTVLHQDWLNGKEYKCKVSNKALPAPIEKTISKAKGQPREPQVYTLPPSREEMTKNQVSLTCLVKGFYPSDIAVEWESNGQPENNYKTTPPVLDSDGSFFLYSKLTVDKSRWQQGNVFSCSVMHEALHNHYTQKSLSLSPGK

SEQ ID NO: 32689 - protein, 330 aa, Homo sapiens [sequence omitted]

SEQ ID NO: 32690 - protein, 330 aa, Homo sapiens
ASTKGPSVFPLAPSSKSTSGGTAALGCLVKDYFPEPVTVSWNSGALTSGVHTFPAVLQSSGLYSLSSVVTVPSSSLGTQTYICNVNHKPSNTKVDKRVEPKSCDKTHTCPPCPAPELLGGPSVFLFPPKPKDTLMISRTPEVTCVVVDVSHEDPEVKFNWYVDGVEVHNAKTKPREEQYNSTYRVVSVLTVLHQDWLNGKEYKCKVSNKALPAPIEKTISKAKGQPREPQVYTLPPSREEMTKNQVSLTCLVKGFYPSDIAVEWESNGQPENNYKTTPPVLDSDGSFFLYSKLTVDKSRWQQGNVFSCSVMHEALHNHYTQKSLSLSPGK

SEQ ID NO: 32691 - protein, 330 aa, Homo sapiens
ASTKGPSVFPLAPSSKSTSGGTAALGCLVKDYFPEPVTVSWNSGALTSGVHTFPAVLQSSGLYSLSSVVTVPSSSLGTQTYICNVNHKPSNTKVDKRVEPKSCDKTHTCPPCPAPELLGGPSVFLFPPKPKDTLMISRTPEVTCVVVDVSHEDPEVKFNWYVDGVEVHNAKTKPREEQYNSTYRVVSVLTVLHQDWLNGKEYKCKVSNKALPAPIEKTISKAKGQPREPQVYTLPPSRDELTKNQVSLTCLVKGFYPSDIAVEWESNGQPENNYKTTPPVLDSDGSFFLYSKLTVDKSRWQQGNVFSCSVMHEALHNHYTQKSLSLSPGK

SEQ ID NO: 32692 - protein, 326 aa, Homo sapiens
ASTKGPSVFPLAPCSRSTSESTAALGCLVKDYFPEPVTVSWNSGALTSGVHTFPAVLQSSGLYSLSSVVTVPSSNFGTQTYTCNVDHKPSNTKVDKTVERKCCVECPPCPAPPVAGPSVFLFPPKPKDTLMISRTPEVTCVVVDVSHEDPEVQFNWYVDGVEVHNAKTKPREEQFNSTFRVVSVLTVVHQDWLNGKEYKCKVSNKGLPAPIEKTISKTKGQPREPQVYTLPPSREEMTKNQVSLTCLVKGFYPSDIAVEWESNGQPENNYKTTPPMLDSDGSFFLYSKLTVDKSRWQQGNVFSCSVMHEALHNHYTQKSLSLSPGK

SEQ ID NO: 32693 - protein, 327 aa, Homo sapiens
ASTKGPSVFPLAPCSRSTSESTAALGCLVKDYFPEPVTVSWNSGALTSGVHTFPAVLQSSGLYSLSSVVTVPSSSLGTKTYTCNVDHKPSNTKVDKRVESKYGPPCPSCPAPEFLGGPSVFLFPPKPKDTLMISRTPEVTCVVVDVSQEDPEVQFNWYVDGVEVHNAKTKPREEQFNSTYRVVSVLTVLHQDWLNGKEYKCKVSNKGLPSSIEKTISKAKGQPREPQVYTLPPSQEEMTKNQVSLTCLVKGFYPSDIAVEWESNGQPENNYKTTPPVLDSDGSFFLYSRLTVDKSRWQEGNVFSCSVMHEALHNHYTQKSLSLSLGK

SEQ ID NO: 32694 - protein, 330 aa, Homo sapiens
ASTKGPSVFPLAPSSKSTSGGTAALGCLVKDYFPEPVTVSWNSGALTSGVHTFPAVLQSSGLYSLSSVVTVPSSSLGTQTYICNVNHKPSNTKVDKKVEPKSCDKTHTCPPCPAPELLGGPSVFLFPPKPKDTLMISRTPEVTCVVVDVSHEDPEVKFNWYVDGVEVHNAKTKPCEEQYGSTYRCVSVLTVLHQDWLNGKEYKCKVSNKALPAPIEKTISKAKGQPREPQVYTLPPSREEMTKNQVSLTCLVKGFYPSDIAVEWESNGQPENNYKTTPPVLDSDGSFFLYSKLTVDKSRWQQGNVFSCSVMHEALHNHYTQKSLSLSPGK

SEQ ID NO: 32695 - protein, 466 aa, synthetic construct
  REGION 1..466: note = Description of Artificial Sequence: Synthetic polypeptide
QVQLVESGGGVVQPGRSLRLSCAASGFTFSNYVMHWVRQAPGKGLEWVAVIWYDGSNKYYADSVKGRFTISRDNSKNTLYLQMNSLRAEDTAVYYCTREVYSSGWYDYGMDVWGQGTTVTVSSASTKGPSVFPLAPSSKSTSGGTAALGCLVKDYFPEPVTVSWNSGALTSGVHTFPAVLQSSGLYSLSSVVTVPSSSLGTQTYICNVNHKPSNTKVDKKVEPKSCGSDEVDGGDKTHTCPPCPAPELLGGPSVFLFPPKPKDTLMISRTPEVTCVVVDVSHEDPEVKFNWYVDGVEVHNAKTKPREEQYNSTYRVVSVLTVLHQDWLNGKEYKCKVSNKALPAPIEKTISKAKGQPREPQVYTLPPSREEMTKNQVSLTCLVKGFYPSDIAVEWESNGQPENNYKTTPPVLDSDGSFFLYSKLTVDKSRWQQGNVFSCSVMHEALHNHYTQKSLSLSPGHHHHHH

SEQ ID NO: 32696 - protein, 214 aa, synthetic construct
  REGION 1..214: note = Description of Artificial Sequence: Synthetic polypeptide
DIQMTQSPSSLSASVGDRVTITCRASQGIRNDLGWYQQKPGKAPKRLIYAASSLQSGVPSRFSGSGSGTEFTLTISSLQPEDFATYYCLQHYSYPRTFGQGTKVEVKRTVAAPSVFIFPPSDEQLKSGTASVVCLLNNFYPREAKVQWKVDNALQSGNSQESVTEQDSKDSTYSLSSTLTLSKADYEKHKVYACEVTHQGLSSPVTKSFNRGEC

SEQ ID NO: 32697 - protein, 232 aa, synthetic construct
  REGION 1..232: note = Description of Artificial Sequence: Synthetic polypeptide
QVQLVESGGGVVQPGRSLRLSCAASGFTFSNYVMHWVRQAPGKGLEWVAVIWYDGSNKYYADSVKGRFTISRDNSKNTLYLQMNSLRAEDTAVYYCTREVYSSGWYDYGMDVWGQGTTVTVSSASTKGPSVFPLAPSSKSTSGGTAALGCLVKDYFPEPVTVSWNSGALTSGVHTFPAVLQSSGLYSLSSVVTVPSSSLGTQTYICNVNHKPSNTKVDKKVEPKSCGSDEVD

SEQ ID NO: 32698 - protein, 214 aa, synthetic construct; identical to SEQ ID NO: 32696
  REGION 1..214: note = Description of Artificial Sequence: Synthetic polypeptide

SEQ ID NO: 32699 - protein, 291 aa, Homo sapiens; identical to SEQ ID NO: 5

SEQ ID NO: 32700 - protein, 291 aa, Macaca fascicularis; identical to SEQ ID NO: 48

SEQ ID NO: 32701 - protein, 284 aa, Canis lupus; identical to SEQ ID NO: 73
  source 1..284: note = subsp. familiaris

SEQ ID NO: 32702 - protein, 286 aa, Sus scrofa; identical to SEQ ID NO: 74

SEQ ID NO: 32703 - protein, 284 aa, Rattus norvegicus; identical to SEQ ID NO: 54

SEQ ID NO: 32704 - protein, 284 aa, Mus musculus; identical to SEQ ID NO: 1

SEQ ID NO: 32705 - protein, 291 aa, Homo sapiens; identical to SEQ ID NO: 5

SEQ ID NO: 32706 - protein, 252 aa, Homo sapiens
MTKEYQDLQHLDNEESDHHQLRKDSQLQEELRGLRETFSNFTASTEAQVKGLSTQGGNVGRKMKSLESQLEKQQKDLSEDHSSLLLHVKQFVSDLRSLSCQMAALQGNGSERTCCPVNWVEHERSCYWFSRSGKAWADADNYCRLEDAHLVVVTSWEEQKFVQHHIGPVNTWMGLHDQNGPWKWVDGTDYETGFKNWRPEQPDDWYGHGLGGGEDCAHFTDDGRWNDDVCQRPYRWVCETELDKASQEPPLL

SEQ ID NO: 32707 - protein, 190 aa, Homo sapiens
MKSLESQLEKQQKDLSEDHSSLLLHVKQFVSDLRSLSCQMAALQGNGSERTCCPVNWVEHERSCYWFSRSGKAWADADNYCRLEDAHLVVVTSWEEQKFVQHHIGPVNTWMGLHDQNGPWKWVDGTDYETGFKNWRPEQPDDWYGHGLGGGEDCAHFTDDGRWNDDVCQRPYRWVCETELDKASQEPPLL

SEQ ID NO: 32708 - protein, 151 aa, Homo sapiens
MAALQGNGSERTCCPVNWVEHERSCYWFSRSGKAWADADNYCRLEDAHLVVVTSWEEQKFVQHHIGPVNTWMGLHDQNGPWKWVDGTDYETGFKNWRPEQPDDWYGHGLGGGEDCAHFTDDGRWNDDVCQRPYRWVCETELDKASQEPPLL

SEQ ID NO: 32709 - protein, 133 aa, Homo sapiens
MKSLESQLEKQQKDLSEDHSSLLLHVKQFVSDLRSLSCQMAALQGNGSERTCCPVNWVEHERSCYWFSRSGKAWADADNYCRLEDAHLVVVTSWEEQKFVQHHIGPVNTWMGLHDQNGPWKWVDGTDYETGFK

SEQ ID NO: 32710 - protein, 94 aa, Homo sapiens
MAALQGNGSERTCCPVNWVEHERSCYWFSRSGKAWADADNYCRLEDAHLVVVTSWEEQKFVQHHIGPVNTWMGLHDQNGPWKWVDGTDYETGFK

SEQ ID NO: 32711 - protein, 301 aa, Mus musculus; identical to SEQ ID NO: 2

SEQ ID NO: 32712 - protein, 301 aa, Rattus norvegicus; identical to SEQ ID NO: 62

SEQ ID NO: 32713 - protein, 287 aa, Homo sapiens; identical to SEQ ID NO: 6

SEQ ID NO: 32714 - protein, 306 aa, Macaca fascicularis
MAKDFQDIQQLSSEENDHPFHRGEGPGPRGLNLRRGNPSLKGPPPAQPLAQRLCSMVRFSLLALSFNILLLVAICVIGSQSAQLQAEMRSLKEAFSNFSSSTLMEVHALGTHGGSVGDKITSLGDKLEKQQQDLKADHDILLLHLKHFPVDLRFVACQMELLHSNGSQRTCCPVNWVEHQGSCYWFSRSGKAWAEAEKYCQLENSHLVVINSWEEQKFIVQHTNPFNTWIGLTDSDGSWKWVDGTDYRHNYKNWAVTQPDDWHGHELGGSEDCVEVRPDGRWNDDFCLQVHRWVCEKRRNATGEAA

SEQ ID NO: 32715 - protein, 283 aa, Sus scrofa; identical to SEQ ID NO: 72

SEQ ID NO: 32716 - protein, 302 aa, Canis lupus; identical to SEQ ID NO: 67
  source 1..302: note = subsp. familiaris

SEQ ID NO: 32717 - protein, 291 aa, Homo sapiens; identical to SEQ ID NO: 5

SEQ ID NO: 32718 - protein, 287 aa, Homo sapiens; identical to SEQ ID NO: 6

SEQ ID NO: 32719-50002 - skipped (17284 entries)

SEQ ID NO: 50003 - protein, 9 aa, synthetic construct
  REGION 1..9: note = Synthetic
  SITE 5: note = MISC_FEATURE - X = Y or E or N or T
  SITE 6: note = MISC_FEATURE - X = Y or F or K or I or R or V or L or M or W or H or S
  SITE 9: note = MISC_FEATURE - X = Y or F or S or N
SSGWXXFDX

SEQ ID NO: 50004 - skipped

SEQ ID NO: 50005 - protein, 17 aa, synthetic construct
  REGION 1..17: note = Synthetic
  SITE 1: note = MISC_FEATURE - X = V or L or A
  SITE 3: note = MISC_FEATURE - X = W or F
  SITE 6: note = MISC_FEATURE - X = G or A
  SITE 7: note = MISC_FEATURE - X = S or R or N
  SITE 8: note = MISC_FEATURE - X = N or Y or G or S
  SITE 10: note = MISC_FEATURE - X = Y or H
  SITE 11: note = MISC_FEATURE - X = Y or H or N
  SITE 12: note = MISC_FEATURE - X = A or V or E or G or T
  SITE 13: note = MISC_FEATURE - X = D or E or G
  SITE 14: note = MISC_FEATURE - X = S or A
  SITE 15: note = MISC_FEATURE - X = V or M
XIXYDXXXKXXXXXXKG

SEQ ID NO: 50006-50009 - skipped (4 entries)

SEQ ID NO: 50010 - protein, 5 aa, synthetic construct
  REGION 1..5: note = Synthetic
  SITE 2: note = MISC_FEATURE - X = C or S or P or Y
GXYWS

SEQ ID NO: 50011 - protein, 16 aa, synthetic construct
  REGION 1..16: note = Synthetic
  SITE 4: note = MISC_FEATURE - X = Hor Y or Q
  SITE 4: note = MISC_FEATURE - X = H or Y or Q
  SITE 5: note = MISC_FEATURE - X = S or R
  SITE 7: note = MISC_FEATURE - X = S or R or C or I
  SITE 9: note = MISC_FEATURE - X = N or S
  SITE 10: note = MISC_FEATURE - X = Y or F
  SITE 15: note = MISC_FEATURE - X = K or T
EINXXGXTXXNPSLXS

SEQ ID NO: 50012 - protein, 7 aa, synthetic construct
  REGION 1..7: note = Synthetic
  SITE 5: note = MISC_FEATURE - X = M or L or I
DYGGXDV

SEQ ID NO: 50013 - protein, 5 aa, synthetic construct
  REGION 1..5: note = Synthetic
NYDIN

SEQ ID NO: 50014 - protein, 17 aa, synthetic construct
  REGION 1..17: note = Synthetic
  SITE 3: note = MISC_FEATURE - X = H or N or Y
  SITE 5: note = MISC_FEATURE - X = N or D
  SITE 6: note = MISC_FEATURE - X = S or N
  SITE 7: note = MISC_FEATURE - X = G or V
  SITE 8: note = MISC_FEATURE - N or S
  SITE 8: note = MISC_FEATURE - X = N or S
  SITE 9: note = MISC_FEATURE - X = T or I
  SITE 11: note = MISC_FEATURE - X = Y or F or C
  SITE 17: note = MISC_FEATURE - X = G or D
WMXPXXXXXGXAQKFQX

SEQ ID NO: 50015 - protein, 9 aa, synthetic construct
  REGION 1..9: note = Synthetic
  SITE 5: note = MISC_FEATURE - X = Y or H or N or S or K
  SITE 6: note = MISC_FEATURE - X = W or R
SSGWXXFDP

SEQ ID NO: 50016 - skipped

SEQ ID NO: 50017 - protein, 17 aa, synthetic construct
  REGION 1..17: note = Synthetic
  SITE 1: note = MISC_FEATURE - X = V or I
  SITE 2: note = MISC_FEATURE - X = I or L
  SITE 4: note = MISC_FEATURE - X = Y or F
  SITE 7: note = MISC_FEATURE - X = S or T
  SITE 9: note = MISC_FEATURE - X = K or E or Q or D or R
  SITE 10: note = MISC_FEATURE - X = N or H or Y
  SITE 11: note = MISC_FEATURE - X = Y or H
  SITE 12: note = MISC_FEATURE - X = A or V or G
  SITE 13: note = MISC_FEATURE - X = D or E
XXWXDGXNXXXXXSVKG

SEQ ID NO: 50018-50019 - skipped (2 entries)

SEQ ID NO: 50020 - protein, 17 aa, synthetic construct
  REGION 1..17: note = Synthetic
  SITE 2: note = MISC_FEATURE - X = I or V
  SITE 3: note = MISC_FEATURE - X = N or H or K or S
  SITE 5: note = MISC_FEATURE - X = N or K
  SITE 6: note = MISC_FEATURE - X = S or N or R or T
  SITE 7: note = MISC_FEATURE - X = G or N or D
  SITE 8: note = MISC_FEATURE - X = G or A
  SITE 9: note = MISC_FEATURE - X = T or S
  SITE 10: note = MISC_FEATURE - X = N or H or Q or I
  SITE 11: note = MISC_FEATURE - X = Y or S or F
  SITE 12: note = MISC_FEATURE - X = A or T
  SITE 14: note = MISC_FEATURE - X = K or R or N or E or S
  SITE 17: note = MISC_FEATURE - X = G or D
WXXPXXXXXXXXQXFQX

SEQ ID NO: 50021-50025 - skipped (5 entries)

SEQ ID NO: 50026 - protein, 17 aa, synthetic construct
  REGION 1..17: note = Synthetic
  SITE 4: note = MISC_FEATURE - X = Y or F
  SITE 5: note = MISC_FEATURE - X = D or E or I or V
  SITE 6: note = MISC_FEATURE - X = E or G or V or A or R
  SITE 7: note = MISC_FEATURE - X = S or N or T or G
  SITE 9: note = MISC_FEATURE - X = K or Q or T or N
  SITE 10: note = MISC_FEATURE - X = Y or H or K
  SITE 12: note = MISC_FEATURE - X = A or T or G or E or V
  SITE 13: note = MISC_FEATURE - X = D or G
  SITE 15: note = MISC_FEATURE - X = V or A
VIWXXXXNXXYXXSXKG

SEQ ID NO: 50027-50028 - skipped (2 entries)

SEQ ID NO: 50029 - protein, 17 aa, synthetic construct
  REGION 1..17: note = Synthetic
  SITE 1: note = MISC_FEATURE - X = S or A or C or L
  SITE 4: note = MISC_FEATURE - X = G or S
  SITE 6: note = MISC_FEATURE - X = S or G or T
  SITE 7: note = MISC_FEATURE - X = S or T or G or Y
  SITE 8: note = MISC_FEATURE - X = Y or H
  SITE 9: note = MISC_FEATURE - X = I or L or M
  SITE 10: note = MISC_FEATURE - X = Y or S or W
  SITE 12: note = MISC_FEATURE - X = A or G or P or V
  SITE 15: note = MISC_FEATURE - X = V or L
  SITE 17: note = MISC_FEATURE - X = G or A
XISXSXXXXXYXDSXKX

SEQ ID NO: 50030-50031 - skipped (2 entries)

SEQ ID NO: 50032 - protein, 17 aa, synthetic construct
  REGION 1..17: note = Synthetic
  SITE 1: note = MISC_FEATURE - X = V or I or A
  SITE 4: note = MISC_FEATURE - X = G or R
  SITE 5: note = MISC_FEATURE - X = R or S
  SITE 7: note = MISC_FEATURE - X = G or V or I or T
  SITE 8: note = MISC_FEATURE - X = N or Y or S or T
  SITE 9: note = MISC_FEATURE - X = T or A
  SITE 10: note = MISC_FEATURE - X = F or Y
  SITE 11: note = MISC_FEATURE - X = Y or N or S
  SITE 16: note = MISC_FEATURE - X = K or R
XISXXGXXXXXADSVXG

SEQ ID NO: 50033 - protein, 12 aa, synthetic construct
  REGION 1..12: note = Synthetic
  SITE 2: note = MISC_FEATURE - X = I or L or M or V
  SITE 5: note = MISC_FEATURE - X = A or D
  SITE 7: note = MISC_FEATURE - X = S or N or Y
  SITE 8: note = MISC_FEATURE - X = E or D
  SITE 10: note = MISC_FEATURE - X = F or C
  SITE 11: note = MISC_FEATURE - X = D or A or H
  SITE 12: note = MISC_FEATURE - X = I or V
RXAVXGXXAXXX

SEQ ID NO: 50034 - skipped

SEQ ID NO: 50035 - protein, 17 aa, synthetic construct
  REGION 1..17: note = Synthetic
  SITE 1: note = MISC_FEATURE - X = A or T or S
  SITE 2: note = MISC_FEATURE - X = I or L
  SITE 4: note = MISC_FEATURE - X = G or R or V
  SITE 5: note = MISC_FEATURE - X = R or G
  SITE 8: note = MISC_FEATURE - X = S or N
  SITE 9: note = MISC_FEATURE - X = T or I
  SITE 10: note = MISC_FEATURE - X = F or Y
  SITE 11: note = MISC_FEATURE - X = H or Y or N
  SITE 15: note = MISC_FEATURE - X = V or E or M
XXSXXGGXXXXADSXKG

SEQ ID NO: 50036 - protein, 15 aa, synthetic construct
  REGION 1..15: note = Synthetic
  SITE 1: note = MISC_FEATURE - X = G or W
  SITE 2: note = MISC_FEATURE - X = E or G
  SITE 5: note = MISC_FEATURE - X = E or Y
  SITE 6: note = MISC_FEATURE - X = D or S or N
  SITE 8: note = MISC_FEATURE - X = Absent or E
  SITE 9: note = MISC_FEATURE - X = Y or S
  SITE 10: note = MISC_FEATURE - X = F or Y
  SITE 11: note = MISC_FEATURE - X = Y or F
  SITE 12: note = MISC_FEATURE - X = G or A
  SITE 13: note = MISC_FEATURE - X = M or I or L
XXLLXXYXXXXXXDV

SEQ ID NO: 50037 - skipped

SEQ ID NO: 50038 - protein, 17 aa, synthetic construct
  REGION 1..17: note = Synthetic
  SITE 1: note = MISC_FEATURE - X = V or L or F or I or D
  SITE 2: note = MISC_FEATURE - X = I or F
  SITE 3: note = MISC_FEATURE - X = W or R
  SITE 4: note = MISC_FEATURE - X = Y or F
  SITE 7: note = MISC_FEATURE - X = S or N or T
  SITE 8: note = MISC_FEATURE - X = N or E or D or K
  SITE 9: note = MISC_FEATURE - X = K or N or T
  SITE 10: note = MISC_FEATURE - X = Y or S or D or N
  SITE 11: note = MISC_FEATURE - X = Y or N
  SITE 12: note = MISC_FEATURE - X = A or V
  SITE 17: note = MISC_FEATURE - X = G or D
XXXXDGXXXXXXDSVKX

SEQ ID NO: 50039 - protein, 21 aa, synthetic construct
  REGION 1..21: note = Synthetic
  SITE 2: note = MISC_FEATURE - X = R or D or W or N
  SITE 3: note = MISC_FEATURE - X = V or D or R or F or H
  SITE 4: note = MISC_FEATURE - X = Y or S or E or G or F
  SITE 5: note = MISC_FEATURE - X = C or G or E
  SITE 6: note = MISC_FEATURE - X = S or G
  SITE 7: note = MISC_FEATURE - X = S or G or R or N
  SITE 8: note = MISC_FEATURE - X = T or Absent or S or P
  SITE 9: note = MISC_FEATURE - X = S or P or Absent or T
  SITE 10: note = MISC_FEATURE - X = C or Absent
  SITE 11: note = MISC_FEATURE - X = Absent or S or H or L or Y
  SITE 12: note = MISC_FEATURE - X = P or Absent or S or Y
  SITE 13: note = MISC_FEATURE - X = Y or Absent
  SITE 14: note = MISC_FEATURE - X = Y or Absent
  SITE 15: note = MISC_FEATURE - X = Y or Absent
  SITE 16: note = MISC_FEATURE - X = Y or F
  SITE 18: note = MISC_FEATURE - X = G or A
  SITE 19: note = MISC_FEATURE - X = M or L
DXXXXXXXXXXXXXXXYXXDV

SEQ ID NO: 50040 - skipped

SEQ ID NO: 50041 - protein, 17 aa, synthetic construct
  REGION 1..17: note = Synthetic
  SITE 2: note = MISC_FEATURE - X = I or T
  SITE 4: note = MISC_FEATURE - X = G or S
  SITE 5: note = MISC_FEATURE - X = S or G or N or T
  SITE 6: note = MISC_FEATURE - X = S or G or D or N
  SITE 7: note = MISC_FEATURE - X = S or T
  SITE 8: note = MISC_FEATURE - X = Y or F or D or L or N or S
  SITE 9: note = MISC_FEATURE - X = I or M or T
  SITE 10: note = MISC_FEATURE - X = Y or N
  SITE 12: note = MISC_FEATURE - X = A or T
SXSXXXXXXXYXDSVKG

SEQ ID NO: 50042-50043 - skipped (2 entries)

SEQ ID NO: 50044 - protein, 17 aa, synthetic construct
  REGION 1..17: note = Synthetic
  SITE 1: note = MISC_FEATURE - X = V or A or I
  SITE 5: note = MISC_FEATURE - X = G or S
  SITE 7: note = MISC_FEATURE - X = S or G or T
  SITE 8: note = MISC_FEATURE - X = S or T
  SITE 9: note = MISC_FEATURE - X = T or A
XISGXGXXXYYADSVKG

SEQ ID NO: 50045 - protein, 14 aa, synthetic construct
  REGION 1..14: note = Synthetic
  SITE 1: note = MISC_FEATURE - X = W or A
  SITE 2: note = MISC_FEATURE - X = R or G
  SITE 4: note = MISC_FEATURE - X = N or T
  SITE 5: note = MISC_FEATURE - X = P or T
  SITE 6: note = MISC_FEATURE - X = T or G
  SITE 7: note = MISC_FEATURE - X = Absent or S
  SITE 8: note = MISC_FEATURE - X = Absent or Y
  SITE 9: note = MISC_FEATURE - X = Absent or Y
  SITE 10: note = MISC_FEATURE - X = D or Y
  SITE 11: note = MISC_FEATURE - X = Y or N or S
XXGXXXXXXXXGMD

SEQ ID NO: 50046 - protein, 7 aa, synthetic construct
  REGION 1..7: note = Synthetic
  SITE 1: note = MISC_FEATURE - X = R or G
  SITE 3: note = MISC_FEATURE - X = S or N
  SITE 4: note = MISC_FEATURE - X = Y or S
XSXXYWG

SEQ ID NO: 50047 - protein, 16 aa, synthetic construct
  REGION 1..16: note = Synthetic
  SITE 1: note = MISC_FEATURE - X = N or S
  SITE 7: note = MISC_FEATURE - X = S or Y or A or T or I
  SITE 8: note = MISC_FEATURE - X = T or A or P or S
  SITE 9: note = MISC_FEATURE - X = Y or Q or S or A or N
  SITE 10: note = MISC_FEATURE - X = Y or C or H
  SITE 11: note = MISC_FEATURE - X = N or I or T
XIYYSGXXXXXPSLKS

SEQ ID NO: 50048 - protein, 9 aa, synthetic construct
  REGION 1..9: note = Synthetic
  SITE 1: note = MISC_FEATURE - X = H or L
  SITE 3: note = MISC_FEATURE - X = S or T or G
  SITE 7: note = MISC_FEATURE - X = L or F or I or V
  SITE 9: note = MISC_FEATURE - X = Y or N or C or D or F
XSXSWSXDX

SEQ ID NO: 50049 - skipped

SEQ ID NO: 50050 - protein, 17 aa, synthetic construct
  REGION 1..17: note = Synthetic
  SITE 4: note = MISC_FEATURE - X = P or S
  SITE 5: note = MISC_FEATURE - X = N or K
  SITE 6: note = MISC_FEATURE - X = S or N
  SITE 7: note = MISC_FEATURE - X = G or D
  SITE 8: note = MISC_FEATURE - X = G or D
  SITE 12: note = MISC_FEATURE - X = A or E
  SITE 13: note = MISC_FEATURE - X = Q or E
  SITE 17: note = MISC_FEATURE - X = G or D
WINXXXXXTNYXXKFQX

SEQ ID NO: 50051-50052 - skipped (2 entries)

SEQ ID NO: 50053 - protein, 17 aa, synthetic construct
  REGION 1..17: note = Synthetic
  SITE 1: note = MISC_FEATURE - X = V or I
  SITE 3: note = MISC_FEATURE - X = W or Y
  SITE 8: note = MISC_FEATURE - X = N or Y
  SITE 9: note = MISC_FEATURE - X = K or E
  SITE 10: note = MISC_FEATURE - X = Y or C or N
XIXYDGSXXXYADSVKG

SEQ ID NO: 50054-50055 - skipped (2 entries)

SEQ ID NO: 50056 - protein, 17 aa, synthetic construct
  REGION 1..17: note = Synthetic
  SITE 1: note = MISC_FEATURE - X = A or V
  SITE 3: note = MISC_FEATURE - X = S or I
  SITE 5: note = MISC_FEATURE - X = S or R or N or F
  SITE 7: note = MISC_FEATURE - X = G or S
  SITE 8: note = MISC_FEATURE - X = N or R or S
  SITE 9: note = MISC_FEATURE - X = T or A
  SITE 10: note = MISC_FEATURE - X = F or Y
XIXGXGXXXXYADSVKG

SEQ ID NO: 50057-50058 - skipped (2 entries)

SEQ ID NO: 50059 - protein, 17 aa, synthetic construct
  REGION 1..17: note = Synthetic
  SITE 1: note = MISC_FEATURE - X = W or S
  SITE 3: note = MISC_FEATURE - X = N or Y
  SITE 4: note = MISC_FEATURE - X = P or R
  SITE 5: note = MISC_FEATURE - X = N or K
  SITE 8: note = MISC_FEATURE - X = G or A
  SITE 9: note = MISC_FEATURE - X = T or A
  SITE 10: note = MISC_FEATURE - X = N or D
  SITE 11: note = MISC_FEATURE - X = Y or N or S
  SITE 12: note = MISC_FEATURE - X = A or G or V
  SITE 17: note = MISC_FEATURE - X = G or D or V
XIXXXSGXXXXXQKFQX

SEQ ID NO: 50060 - protein, 15 aa, synthetic construct
  REGION 1..15: note = Synthetic
  SITE 1: note = MISC_FEATURE - X = S or A or V or T
  SITE 2: note = MISC_FEATURE - X = Y or F or N
  SITE 4: note = MISC_FEATURE - X = Y or H
  SITE 8: note = MISC_FEATURE - X = S or T
  SITE 10: note = MISC_FEATURE - X = Y or H
  SITE 12: note = MISC_FEATURE - X = E or G or D
XXYXGSGXYXNXFDY

SEQ ID NO: 50061 - protein, 5 aa, synthetic construct
  REGION 1..5: note = Synthetic
  SITE 4: note = MISC_FEATURE - X = I or T
GYYXH

SEQ ID NO: 50062 - protein, 17 aa, synthetic construct
  REGION 1..17: note = Synthetic
  SITE 8: note = MISC_FEATURE - X = D or G
  SITE 10: note = MISC_FEATURE - X = N or K
  SITE 11: note = MISC_FEATURE - X = Y or S
WINPYSGXTXXAQKFQG

SEQ ID NO: 50063 - skipped

SEQ ID NO: 50064 - protein, 17 aa, synthetic construct
  REGION 1..17: note = Synthetic
  SITE 4: note = MISC_FEATURE - X = G or S
  SITE 5: note = MISC_FEATURE - X = S or T
  SITE 6: note = MISC_FEATURE - X = S or I or N
  SITE 7: note = MISC_FEATURE - X = S or N or T or Y
  SITE 9: note = MISC_FEATURE - X = I or M or S
  SITE 10: note = MISC_FEATURE - X = Y or N
  SITE 12: note = MISC_FEATURE - X = A or T
SISXXXXYXXYXDSVKG

SEQ ID NO: 50065 - protein, 5 aa, synthetic construct
  REGION 1..5: note = Synthetic
LTFDY

SEQ ID NO: 50066 - protein, 5 aa, synthetic construct
  REGION 1..5: note = Synthetic
  SITE 1: note = MISC_FEATURE - X = T or S
XYGMH

SEQ ID NO: 50067 - protein, 17 aa, synthetic construct
  REGION 1..17: note = Synthetic
  SITE 1: note = MISC_FEATURE - X = I or V
  SITE 7: note = MISC_FEATURE - X = T or S
  SITE 16: note = MISC_FEATURE - X = K or R
XIWYDGXNKYYADSVXG

SEQ ID NO: 50068 - protein, 13 aa, synthetic construct
  REGION 1..13: note = Synthetic
  SITE 11: note = MISC_FEATURE - X = M or L
DPLRGYNDPVXDY

SEQ ID NO: 50069 - skipped

SEQ ID NO: 50070 - protein, 17 aa, synthetic construct
  REGION 1..17: note = Synthetic
  SITE 5: note = MISC_FEATURE - X = R or S
  SITE 7: note = MISC_FEATURE - X = G or K
AISGXGXNTFYADSVKG

SEQ ID NO: 50071 - protein, 13 aa, synthetic construct
  REGION 1..13: note = Synthetic
RVTDYGGNDWFDP

SEQ ID NO: 50072 - protein, 5 aa, synthetic construct
  REGION 1..5: note = Synthetic
  SITE 1: note = MISC_FEATURE - X = T or S
XYGMH

SEQ ID NO: 50073 - protein, 17 aa, synthetic construct
  REGION 1..17: note = Synthetic
  SITE 2: note = MISC_FEATURE - X = I or V
  SITE 5: note = MISC_FEATURE - X = G or D
  SITE 7: note = MISC_FEATURE - X = S or N
  SITE 8: note = MISC_FEATURE - X = N or D or S
  SITE 9: note = MISC_FEATURE - X = K or T
  SITE 10: note = MISC_FEATURE - X = D or Y or S
  SITE 11: note = MISC_FEATURE - X = Y or F
  SITE 12: note = MISC_FEATURE - X = A or V
  SITE 16: note = MISC_FEATURE - X = K or R or T
VXWYXGXXXXXXDSVXG

SEQ ID NO: 50074 - protein, 20 aa, synthetic construct
  REGION 1..20: note = Synthetic
  SITE 3: note = MISC_FEATURE - X = D or V
  SITE 4: note = MISC_FEATURE - X = Y or F
  SITE 8: note = MISC_FEATURE - X = G or T
  SITE 9: note = MISC_FEATURE - X = S or T or N
DRXXCSGXXCPYYYYYGMDV

SEQ ID NO: 50075 - protein, 7 aa, synthetic construct
  REGION 1..7: note = Synthetic
RSSYYWG

SEQ ID NO: 50076 - protein, 16 aa, synthetic construct
  REGION 1..16: note = Synthetic
  SITE 5: note = MISC_FEATURE - X = S or G
  SITE 7: note = MISC_FEATURE - X = S or T or N
  SITE 8: note = MISC_FEATURE - X = T or A
  SITE 10: note = MISC_FEATURE - X = Y or N or D or H or T
  SITE 14: note = MISC_FEATURE - X = L or V
  SITE 16: note = MISC_FEATURE - X = S or G
NIYYXGXXYXNPSXKX

SEQ ID NO: 50077 - protein, 9 aa, synthetic construct
  REGION 1..9: note = Synthetic
  SITE 9: note = MISC_FEATURE - X = Y or F or N
HGKDWGLDX

SEQ ID NO: 50078 - protein, 5 aa, synthetic construct
  REGION 1..5: note = Synthetic
  SITE 4: note = MISC_FEATURE - X = M or I
GYYXH

SEQ ID NO: 50079 - protein, 17 aa, synthetic construct
  REGION 1..17: note = Synthetic
  SITE 3: note = MISC_FEATURE - X = K or N
  SITE 5: note = MISC_FEATURE - X = N or K
  SITE 11: note = MISC_FEATURE - X = Q or S or H or N or Y
  SITE 12: note = MISC_FEATURE - A or V
  SITE 12: note = MISC_FEATURE - X = A or V
WIXPXSGGTNXXQKFQG

SEQ ID NO: 50080 - protein, 15 aa, synthetic construct
  REGION 1..15: note = Synthetic
  SITE 4: note = MISC_FEATURE - X = T or K or I
  SITE 5: note = MISC_FEATURE - X = A or V
  SITE 6: note = MISC_FEATURE - X = A or P
  SITE 7: note = MISC_FEATURE - X = A or T
  SITE 9: note = MISC_FEATURE - X = T or S
  SITE 12: note = MISC_FEATURE - X = Y or F or C
APGXXXXGXWGXFDY

SEQ ID NO: 50081 - protein, 7 aa, synthetic construct
  REGION 1..7: note = Synthetic
  SITE 2: note = MISC_FEATURE - X = G or S
TXGVGVG

SEQ ID NO: 50082 - protein, 16 aa, synthetic construct
  REGION 1..16: note = Synthetic
  SITE 1: note = MISC_FEATURE - X = L or F
  SITE 5: note = MISC_FEATURE - X = D or H or N or K or S
  SITE 8: note = MISC_FEATURE - X = K or E
  SITE 15: note = MISC_FEATURE - X = K or R
XIYWXDDXRYSPSLXS

SEQ ID NO: 50083 - protein, 8 aa, synthetic construct
  REGION 1..8: note = Synthetic
  SITE 1: note = MISC_FEATURE - X - L or I or A
  SITE 1: note = MISC_FEATURE - X = L or I or A
  SITE 2: note = MISC_FEATURE - X = I or V or A
  SITE 5: note = MISC_FEATURE - X = A or S
  SITE 6: note = MISC_FEATURE - X = F or C
XXAVXXDY

SEQ ID NO: 50084 - protein, 5 aa, synthetic construct
  REGION 1..5: note = Synthetic
  SITE 1: note = MISC_FEATURE - X = S or N or T
XYGMH

SEQ ID NO: 50085 - protein, 17 aa, synthetic construct
  REGION 1..17: note = Synthetic
  SITE 1: note = MISC_FEATURE - X = I or V
  SITE 8: note = MISC_FEATURE - X = Y or N
  SITE 12: note = MISC_FEATURE - X = A or V
XIWYDGSXKYYXDSVKG

SEQ ID NO: 50086 - protein, 12 aa, synthetic construct
  REGION 1..12: note = Synthetic
  SITE 2: note = MISC_FEATURE - X = A or G or R or N
  SITE 9: note = MISC_FEATURE - X = Y or F or H
  SITE 10: note = MISC_FEATURE - X = F or L or Y or W
  SITE 11: note = MISC_FEATURE - X = D or G
  SITE 12: note = MISC_FEATURE - X = Y or S
EXYDFWSGXXXX

SEQ ID NO: 50087 - protein, 5 aa, synthetic construct
  REGION 1..5: note = Synthetic
  SITE 4: note = MISC_FEATURE - X = M or L
SYGXH

SEQ ID NO: 50088 - protein, 17 aa, synthetic construct
  REGION 1..17: note = Synthetic
  SITE 10: note = MISC_FEATURE - X = Y or N
  SITE 12: note = MISC_FEATURE - X = A or E
VIWYDGSNKXYXDSVKG

SEQ ID NO: 50089 - protein, 17 aa, synthetic construct
  REGION 1..17: note = Synthetic
  SITE 1: note = MISC_FEATURE - X = D or W
  SITE 2: note = MISC_FEATURE - X = R or G or Y
  SITE 3: note = MISC_FEATURE - X = D or S or Y
  SITE 5: note = MISC_FEATURE - X = G or Y
  SITE 6: note = MISC_FEATURE - X = D or Y
  SITE 7: note = MISC_FEATURE - X = Absent or P
  SITE 8: note = MISC_FEATURE - X = Absent or P
  SITE 9: note = MISC_FEATURE - X = Absent or Y
  SITE 10: note = MISC_FEATURE - X = Absent or Y
  SITE 11: note = MISC_FEATURE - X = Absent or Y
  SITE 12: note = MISC_FEATURE - X = Absent or Y
  SITE 13: note = MISC_FEATURE - X = Y or D
XXXYXXXXXXXXXGMDV

SEQ ID NO: 50090 - skipped

SEQ ID NO: 50091 - protein, 17 aa, synthetic construct
  REGION 1..17: note = Synthetic
  SITE 1: note = MISC_FEATURE - X = A or G
  SITE 2: note = MISC_FEATURE - X = I or S or V
  SITE 3: note = MISC_FEATURE - X = S or V
  SITE 5: note = MISC_FEATURE - X = S or R
  SITE 7: note = MISC_FEATURE - X = G or A or S or V
  SITE 8: note = MISC_FEATURE - X = N or R or K
  SITE 10: note = MISC_FEATURE - X = F or Y
  SITE 11: note = MISC_FEATURE - X = Y or N
  SITE 12: note = MISC_FEATURE - X = A or T
  SITE 16: note = MISC_FEATURE - X = K or T
XXXGXGXXTXXXDSVXG

SEQ ID NO: 50092-50093 - skipped (2 entries)

SEQ ID NO: 50094 - protein, 17 aa, synthetic construct
  REGION 1..17: note = Synthetic
  SITE 1: note = MISC_FEATURE - X = A or G or T or S
  SITE 2: note = MISC_FEATURE - X = M or I or T
  SITE 7: note = MISC_FEATURE - X = G or N or V
  SITE 8: note = MISC_FEATURE - X = R or N or W
  SITE 10: note = MISC_FEATURE - X = Y or F or N
  SITE 16: note = MISC_FEATURE - X = K or N
  SITE 17: note = MISC_FEATURE - X = G or D
XXSGSGXXTXYADSVXX

SEQ ID NO: 50095-50096 - skipped (2 entries)

SEQ ID NO: 50097 - protein, 17 aa, synthetic construct
  REGION 1..17: note = Synthetic
  SITE 1: note = MISC_FEATURE - X = I or V
  SITE 5: note = MISC_FEATURE - X = A or G or D or S or V
  SITE 7: note = MISC_FEATURE - X = S or I or N or R or T
  SITE 9: note = MISC_FEATURE - X = K or N or Q
  SITE 10: note = MISC_FEATURE - X = Y or S or D or H
  SITE 11: note = MISC_FEATURE - X = Y or S
XISYXGXNXXXADSVKG

SEQ ID NO: 50098 - protein, 20 aa, synthetic construct
  REGION 1..20: note = Synthetic
  SITE 1: note = MISC_FEATURE - X = R or E
  SITE 2: note = MISC_FEATURE - X = G or D
  SITE 3: note = MISC_FEATURE - X = Y or R
  SITE 4: note = MISC_FEATURE - X = S or Y
  SITE 5: note = MISC_FEATURE - X = Y or C
  SITE 6: note = MISC_FEATURE - X = G or S
  SITE 7: note = MISC_FEATURE - X = Absent or G
  SITE 8: note = MISC_FEATURE - X = Absent or T
  SITE 9: note = MISC_FEATURE - X = Absent or S
  SITE 10: note = MISC_FEATURE - X = Absent or C
  SITE 11: note = MISC_FEATURE - X = Absent or P
  SITE 12: note = MISC_FEATURE - X = Absent or Y
  SITE 13: note = MISC_FEATURE - X = Absent or Y
  SITE 14: note = MISC_FEATURE - X = Absent or Y
  SITE 15: note = MISC_FEATURE - X = G or Y
XXXXXXXXXXXXXXXYGMDV

SEQ ID NO: 50099 - skipped

SEQ ID NO: 50100 - protein, 17 aa, synthetic construct
  REGION 1..17: note = Synthetic
  SITE 1: note = MISC_FEATURE - X = V or I
  SITE 17: note = MISC_FEATURE - X = G or V
XIWYDGSNKYYADSVKX

SEQ ID NO: 50101 - protein, 14 aa, synthetic construct
  REGION 1..14: note = Synthetic
  SITE 2: note = MISC_FEATURE - X = P or R
  SITE 4: note = MISC_FEATURE - X = T or N
  SITE 8: note = MISC_FEATURE - X = Y or H
  SITE 12: note = MISC_FEATURE - X = M or L
EXYXSGWXDYGXDV

SEQ ID NO: 50102 - protein, 5 aa, synthetic construct
  REGION 1..5: note = Synthetic
  SITE 4: note = MISC_FEATURE - X = I or F or V
SYGXS

SEQ ID NO: 50103 - protein, 17 aa, synthetic construct
  REGION 1..17: note = Synthetic
  SITE 9: note = MISC_FEATURE - X = T or R
  SITE 11: note = MISC_FEATURE - X = Y or N or E or F
  SITE 14: note = MISC_FEATURE - X = K or R
  SITE 15: note = MISC_FEATURE - X = L or F
WISAYNGNXKXAQXXQG

SEQ ID NO: 50104 - protein, 5 aa, synthetic construct
  REGION 1..5: note = Synthetic
  SITE 2: note = MISC_FEATURE - X = Y or S
SXAMS

SEQ ID NO: 50105 - protein, 17 aa, synthetic construct
  REGION 1..17: note = Synthetic
  SITE 1: note = MISC_FEATURE - X = A or V or S
  SITE 5: note = MISC_FEATURE - X = R or S
  SITE 7: note = MISC_FEATURE - X = G or I or V
  SITE 8: note = MISC_FEATURE - X = N or S
  SITE 11: note = MISC_FEATURE - X = D or Y
  SITE 12: note = MISC_FEATURE - X = A or T
XISGXGXXTFXXDSVKG

SEQ ID NO: 50106 - protein, 9 aa, synthetic construct
  REGION 1..9: note = Synthetic
  SITE 1: note = MISC_FEATURE - X = E or S
  SITE 2: note = MISC_FEATURE - X = R or N
  SITE 4: note = MISC_FEATURE - X = G or S
  SITE 5: note = MISC_FEATURE - X = S or G
  SITE 6: note = MISC_FEATURE - X = Y or W
XXSXXXFDY

SEQ ID NO: 50107 - skipped

SEQ ID NO: 50108 - protein, 17 aa, synthetic construct
  REGION 1..17: note = Synthetic
  SITE 1: note = MISC_FEATURE - X = V or L
  SITE 4: note = MISC_FEATURE - X = H or Y
  SITE 7: note = MISC_FEATURE - X = S or T
  SITE 8: note = MISC_FEATURE - X = N or D
  SITE 9: note = MISC_FEATURE - X = K or A
  SITE 12: note = MISC_FEATURE - X = A or V or G
XIWXDGXXXYYXDSVKG

SEQ ID NO: 50109 - protein, 21 aa, synthetic construct
  REGION 1..21: note = Synthetic
  SITE 6: note = MISC_FEATURE - X = Y or F
ENSSSXYFDYWGQGTLVTVSS

SEQ ID NO: 50110 - protein, 7 aa, synthetic construct
  REGION 1..7: note = Synthetic
TSGVGVG

SEQ ID NO: 50111 - protein, 16 aa, synthetic construct
  REGION 1..16: note = Synthetic
  SITE 10: note = MISC_FEATURE - X = Y or F
LINWNDDKRXSPSLKS

SEQ ID NO: 50112 - protein, 9 aa, synthetic construct
  REGION 1..9: note = Synthetic
  SITE 2: note = MISC_FEATURE - X = A or T
KXTWVAFDI

SEQ ID NO: 50113 - skipped

SEQ ID NO: 50114 - protein, 17 aa, synthetic construct
  REGION 1..17: note = Synthetic
  SITE 1: note = MISC_FEATURE - X = A or D
  SITE 2: note = MISC_FEATURE - X = I or M
  SITE 7: note = MISC_FEATURE - X = G or D or V
  SITE 8: note = MISC_FEATURE - X = R or S or F or T
  SITE 12: note = MISC_FEATURE - X = A or V
XXSGSGXXTYYXDSVKG

SEQ ID NO: 50115-50116 - skipped (2 entries)

SEQ ID NO: 50117 - protein, 17 aa, synthetic construct
  REGION 1..17: note = Synthetic
  SITE 1: note = MISC_FEATURE - X = V or A or I
  SITE 2: note = MISC_FEATURE - X = I or L
  SITE 5: note = MISC_FEATURE - X = R or S or G
  SITE 7: note = MISC_FEATURE - X = G or S or K
  SITE 8: note = MISC_FEATURE - X = T or N or S
  SITE 10: note = MISC_FEATURE - X = F or Y
XXSGXGXXTXYADSVKG

SEQ ID NO: 50118 - protein, 10 aa, synthetic construct
  REGION 1..10: note = Synthetic
  SITE 4: note = MISC_FEATURE - X = P or G
  SITE 5: note = MISC_FEATURE - X = S or D or E
  SITE 7: note = MISC_FEATURE - X = V or A
  SITE 10: note = MISC_FEATURE - X = I or V
  SITE 10: note = MISC_FEATURE - X = I or V
KRTXXDXFDX

SEQ ID NO: 50119 - protein, 7 aa, synthetic construct
  REGION 1..7: note = Synthetic
SGGDYWS

SEQ ID NO: 50120 - protein, 16 aa, synthetic construct
  REGION 1..16: note = Synthetic
  SITE 7: note = MISC_FEATURE - X = S or I or P
YIYYSGXTYYNPSLKS

SEQ ID NO: 50121 - protein, 9 aa, synthetic construct
  REGION 1..9: note = Synthetic
  SITE 2: note = MISC_FEATURE - X = S or G or H
  SITE 3: note = MISC_FEATURE - X = S or A
  SITE 4: note = MISC_FEATURE - X = S or L or R
  SITE 5: note = MISC_FEATURE - X = Y or R or H
DXXXXGMDV

SEQ ID NO: 50122-50137 - skipped (16 entries)

SEQ ID NO: 50138 - protein, 11 aa, synthetic construct
  REGION 1..11: note = Synthetic
  SITE 2: note = MISC_FEATURE - X = A or T
  SITE 3: note = MISC_FEATURE - X = S or N
  SITE 5: note = MISC_FEATURE - X = G or D or A or V or S
  SITE 7: note = MISC_FEATURE - X = S or G or N or R or A or F
  SITE 8: note = MISC_FEATURE - X = N or K or R or H or S or T or I
  SITE 9: note = MISC_FEATURE - X = Y or H or C or D
  SITE 11: note = MISC_FEATURE - X = A or D or V or I or N
RXXQXIXXXLX

SEQ ID NO: 50139-50149 - skipped (11 entries)

SEQ ID NO: 50150 - protein, 16 aa, synthetic construct
  REGION 1..16: note = Synthetic
  SITE 1: note = MISC_FEATURE - X = K or M or R or T
  SITE 3: note = MISC_FEATURE - X = S or G or T
  SITE 4: note = MISC_FEATURE - X = Q or K
  SITE 5: note = MISC_FEATURE - X = S or R or N or T
  SITE 7: note = MISC_FEATURE - X = L or R or V
  SITE 8: note = MISC_FEATURE - X = H or Y
  SITE 9: note = MISC_FEATURE - X = G or S
  SITE 10: note = MISC_FEATURE - X = D or E or G
  SITE 12: note = MISC_FEATURE - X = K or R
  SITE 14: note = MISC_FEATURE - X = Y or F
  SITE 15: note = MISC_FEATURE - X = L or F
  SITE 16: note = MISC_FEATURE - X = Y or F or T or C or S
XSXXXLXXXXGXTXXX

SEQ ID NO: 50151-50155 - skipped (5 entries)

SEQ ID NO: 50156 - protein, 17 aa, synthetic construct
  REGION 1..17: note = Synthetic
  SITE 1: note = MISC_FEATURE - X = K or R or T
  SITE 3: note = MISC_FEATURE - X = S or I
  SITE 5: note = MISC_FEATURE - X = S or N
  SITE 6: note = MISC_FEATURE - X = V or I
  SITE 8: note = MISC_FEATURE - X = Y or H or S or F
  SITE 9: note = MISC_FEATURE - X = S or N or I or R or H
  SITE 11: note = MISC_FEATURE - X = N or H
  SITE 12: note = MISC_FEATURE - X = N or S or D
  SITE 13: note = MISC_FEATURE - X = N or Y or K or H or A or M or Q
  SITE 14: note = MISC_FEATURE - X = N or K
  SITE 15: note = MISC_FEATURE - X = Y or F
  SITE 17: note = MISC_FEATURE - X = A or T or D
XSXQXXLXXSXXXXXLX

SEQ ID NO: 50157-50158 - skipped (2 entries)

SEQ ID NO: 50159 - protein, 11 aa, synthetic construct
  REGION 1..11: note = Synthetic
  SITE 3: note = MISC_FEATURE - X = S or N
  SITE 5: note = MISC_FEATURE - X = G or D or F or N or V
  SITE 6: note = MISC_FEATURE - X = I or L or V
  SITE 7: note = MISC_FEATURE - X = S or N or T or I or F or G
  SITE 8: note = MISC_FEATURE - X = N or S or D or T or R
  SITE 9: note = MISC_FEATURE - X = W or C
RAXQXXXXXLA

SEQ ID NO: 50160 - skipped

SEQ ID NO: 50161 - protein, 9 aa, synthetic construct
  REGION 1..9: note = Synthetic
  SITE 1: note = MISC_FEATURE - X = Q or L
  SITE 3: note = MISC_FEATURE - X = A or T or S or G or V or Y
  SITE 4: note = MISC_FEATURE - X = N or D or H or Y
  SITE 6: note = MISC_FEATURE - X = F or L
  SITE 8: note = MISC_FEATURE - X = W or R or P
XQXXSXPXT

SEQ ID NO: 50162 - protein, 17 aa, synthetic construct
  REGION 1..17: note = Synthetic
  SITE 3: note = MISC_FEATURE - X = S or N
  SITE 5: note = MISC_FEATURE - X = S or R or N
  SITE 6: note = MISC_FEATURE - X = V or I or L
  SITE 7: note = MISC_FEATURE - X = L or F
  SITE 8: note = MISC_FEATURE - X = H or F or Y or K or S
  SITE 9: note = MISC_FEATURE - X = S or N or H
  SITE 11: note = MISC_FEATURE - X = N or H
  SITE 12: note = MISC_FEATURE - X = N or S
  SITE 13: note = MISC_FEATURE - X = N or K or Y or H
  SITE 14: note = MISC_FEATURE - X = N or R or S
  SITE 17: note = MISC_FEATURE - X = A or T or V
KSXQXXXXXSXXXXYLX

SEQ ID NO: 50163 - protein, 7 aa, synthetic construct
  REGION 1..7: note = Synthetic
  SITE 4: note = MISC_FEATURE - X = T or A or I or S
  SITE 5: note = MISC_FEATURE - X = R or L
  SITE 6: note = MISC_FEATURE - X = E or K or D
WASXXXS

SEQ ID NO: 50164 - skipped

SEQ ID NO: 50165 - protein, 14 aa, synthetic construct
  REGION 1..14: note = Synthetic
  SITE 1: note = MISC_FEATURE - X = A or V or G
  SITE 2: note = MISC_FEATURE - X = S or F or L
  SITE 3: note = MISC_FEATURE - X = S or N
  SITE 5: note = MISC_FEATURE - X = G or E
  SITE 6: note = MISC_FEATURE - X = A or S or T
  SITE 10: note = MISC_FEATURE - X = G or A
  SITE 11: note = MISC_FEATURE - X = Y or S or N or F
  SITE 12: note = MISC_FEATURE - X = Y or F
  SITE 14: note = MISC_FEATURE - X = N or S or Q
XXXTXXVTSXXXPX

SEQ ID NO: 50166 - protein, 7 aa, synthetic construct
  REGION 1..7: note = Synthetic
  SITE 1: note = MISC_FEATURE - X = S or H or N
  SITE 3: note = MISC_FEATURE - X = S or N or D or I or T
  SITE 5: note = MISC_FEATURE - X = K or R
XTXNXHS

SEQ ID NO: 50167 - skipped

SEQ ID NO: 50168 - protein, 11 aa, synthetic construct
  REGION 1..11: note = Synthetic
  SITE 2: note = MISC_FEATURE - X = A or S
  SITE 4: note = MISC_FEATURE - X = Q or L or M or V
  SITE 5: note = MISC_FEATURE - X = S or N or D or R or T
  SITE 6: note = MISC_FEATURE - X = V or I
  SITE 7: note = MISC_FEATURE - X = N or K or S or V or A or I or L
  SITE 8: note = MISC_FEATURE - X = S or N or T
  SITE 9: note = MISC_FEATURE - X = N or S or Y
RXSXXXXXXLA

SEQ ID NO: 50169 - protein, 7 aa, synthetic construct
  REGION 1..7: note = Synthetic
  SITE 1: note = MISC_FEATURE - X = G or I or F or V
  SITE 2: note = MISC_FEATURE - X = A or T
  SITE 4: note = MISC_FEATURE - X = T or I
XXSXRAT

SEQ ID NO: 50170-50171 - skipped (2 entries)

SEQ ID NO: 50172 - protein, 7 aa, synthetic construct
  REGION 1..7: note = Synthetic
  SITE 4: note = MISC_FEATURE - X = T or S
  SITE 7: note = MISC_FEATURE - X = T or S or I
GASXRAX

SEQ ID NO: 50173 - protein, 9 aa, synthetic construct
  REGION 1..9: note = Synthetic
  SITE 4: note = MISC_FEATURE - X = G or V
  SITE 5: note = MISC_FEATURE - X = C or N or S
  SITE 7: note = MISC_FEATURE - X = P or L
QQYXXSXLT

SEQ ID NO: 50174 - protein, 16 aa, synthetic construct
  REGION 1..16: note = Synthetic
  SITE 5: note = MISC_FEATURE - X = S or T
  SITE 7: note = MISC_FEATURE - X = L or Q
  SITE 8: note = MISC_FEATURE - X = H or R
  SITE 9: note = MISC_FEATURE - X = S or G
  SITE 10: note = MISC_FEATURE - X = E or D
  SITE 12: note = MISC_FEATURE - X = K or R
  SITE 14: note = MISC_FEATURE - X = Y or H or F
  SITE 16: note = MISC_FEATURE - X = Y or N
KSSQXLXXXXGXTXLX

SEQ ID NO: 50175 - protein, 7 aa, synthetic construct
  REGION 1..7: note = Synthetic
  SITE 2: note = MISC_FEATURE - X = V or I
  SITE 4: note = MISC_FEATURE - X = N or Y or H
  SITE 6: note = MISC_FEATURE - X = F or I or V or L
EXSXRXS

SEQ ID NO: 50176 - skipped

SEQ ID NO: 50177 - protein, 14 aa, synthetic construct
  REGION 1..14: note = Synthetic
  SITE 7: note = MISC_FEATURE - X = V or I
  SITE 9: note = MISC_FEATURE - X = G or S
  SITE 12: note = MISC_FEATURE - X = Y or F
TGTSSDXGXYNXVS

SEQ ID NO: 50178 - protein, 7 aa, synthetic construct
  REGION 1..7: note = Synthetic
  SITE 3: note = MISC_FEATURE - X = S or R
EVXNRPS

SEQ ID NO: 50179 - protein, 10 aa, synthetic construct
  REGION 1..10: note = Synthetic
  SITE 1: note = MISC_FEATURE - X = N or G or C or S
  SITE 4: note = MISC_FEATURE - X = T or V or K
  SITE 5: note = MISC_FEATURE - X = R or S or K
  SITE 6: note = MISC_FEATURE - X = S or G or N or R
  SITE 7: note = MISC_FEATURE - X = I or S or Y
XSYXXXXTWV

SEQ ID NO: 50180 - protein, 11 aa, synthetic construct
  REGION 1..11: note = Synthetic
  SITE 2: note = MISC_FEATURE - X = A or S
  SITE 4: note = MISC_FEATURE - X = Q or H or R
  SITE 5: note = MISC_FEATURE - X = S or N or T or H
  SITE 7: note = MISC_FEATURE - X = S or N or G or T
  SITE 8: note = MISC_FEATURE - X = N or S or R
  SITE 9: note = MISC_FEATURE - X = Y or F
RXSXXIXXXLN

SEQ ID NO: 50181 - skipped

SEQ ID NO: 50182 - protein, 10 aa, synthetic construct
  REGION 1..10: note = Synthetic
  SITE 3: note = MISC_FEATURE - X = S or G or T
  SITE 5: note = MISC_FEATURE - X = S or T or N or R
  SITE 6: note = MISC_FEATURE - X = T or S or Absent
  SITE 7: note = MISC_FEATURE - X = P or I
  SITE 8: note = MISC_FEATURE - X = T or P or Q or L
QQXYXXXXWT

SEQ ID NO: 50183 - protein, 11 aa, synthetic construct
  REGION 1..11: note = Synthetic
  SITE 5: note = MISC_FEATURE - X = G or D
  SITE 8: note = MISC_FEATURE - X = S or N or I or K
  SITE 9: note = MISC_FEATURE - X = W or Y
RASQXISXXLA

SEQ ID NO: 50184 - protein, 7 aa, synthetic construct
  REGION 1..7: note = Synthetic
  SITE 7: note = MISC_FEATURE - X = S or G
AASSLQX

SEQ ID NO: 50185 - protein, 9 aa, synthetic construct
  REGION 1..9: note = Synthetic
  SITE 3: note = MISC_FEATURE - X = I or T or V or A or G
  SITE 4: note = MISC_FEATURE - X = N or K
QQXXSFPLT

SEQ ID NO: 50186 - protein, 11 aa, synthetic construct
  REGION 1..11: note = Synthetic
  SITE 3: note = MISC_FEATURE - X = S or N
  SITE 5: note = MISC_FEATURE - X = D or Y
  SITE 7: note = MISC_FEATURE - X = N or S or T or F or Y
  SITE 8: note = MISC_FEATURE - X = N or D
  SITE 9: note = MISC_FEATURE - X = Y or F
QAXQXIXXXLN

SEQ ID NO: 50187 - protein, 7 aa, synthetic construct
  REGION 1..7: note = Synthetic
  SITE 2: note = MISC_FEATURE - X = A or G
  SITE 4: note = MISC_FEATURE - X = N or T or D or S
DXSXLET

SEQ ID NO: 50188 - protein, 9 aa, synthetic construct
  REGION 1..9: note = Synthetic
  SITE 3: note = MISC_FEATURE - X = Y or F
  SITE 4: note = MISC_FEATURE - X = D or E
  SITE 5: note = MISC_FEATURE - X = N or Absent or I
  SITE 6: note = MISC_FEATURE - X = L or N or V
  SITE 7: note = MISC_FEATURE - X = P or L
QQXXXXXIT

SEQ ID NO: 50189 - protein, 13 aa, synthetic construct
  REGION 1..13: note = Synthetic
  SITE 7: note = MISC_FEATURE - X = I or L
  SITE 9: note = MISC_FEATURE - X = N or S
  SITE 10: note = MISC_FEATURE - X = N or H or K
  SITE 11: note = MISC_FEATURE - X = Y or F
  SITE 12: note = MISC_FEATURE - X = V or L
SGSSSNXGXXXXS

SEQ ID NO: 50190 - protein, 7 aa, synthetic construct
  REGION 1..7: note = Synthetic
  SITE 2: note = MISC_FEATURE - X = N or S
  SITE 3: note = MISC_FEATURE - X = N or Y or S
DXXKRPS

SEQ ID NO: 50191 - protein, 11 aa, synthetic construct
  REGION 1..11: note = Synthetic
  SITE 2: note = MISC_FEATURE - X = T or A or I
  SITE 5: note = MISC_FEATURE - X = S or G or I or R
  SITE 6: note = MISC_FEATURE - X = S or R
  SITE 8: note = MISC_FEATURE - X = S or N
  SITE 9: note = MISC_FEATURE - X = V or A or T
  SITE 10: note = MISC_FEATURE - X = G or V or M
GXWDXXLXXXV

SEQ ID NO: 50192 - protein, 13 aa, synthetic construct
  REGION 1..13: note = Synthetic
  SITE 3: note = MISC_FEATURE - X = S or T
  SITE 4: note = MISC_FEATURE - X = S or N
  SITE 6: note = MISC_FEATURE - X = N or Y
  SITE 9: note = MISC_FEATURE - X = S or N
  SITE 10: note = MISC_FEATURE - X = N or Y
  SITE 11: note = MISC_FEATURE - X = T or A or S
  SITE 12: note = MISC_FEATURE - X = V or I
  SITE 13: note = MISC_FEATURE - X = N or D or S
SGXXSXIGXXXXX

SEQ ID NO: 50193 - skipped

SEQ ID NO: 50194 - protein, 12 aa, synthetic construct
  REGION 1..12: note = Synthetic
  SITE 1: note = MISC_FEATURE - X = A or E
  SITE 6: note = MISC_FEATURE - X = S or Absent
  SITE 7: note = MISC_FEATURE - X = Absent or L
  SITE 8: note = MISC_FEATURE - X = L or N or M or S
  SITE 9: note = MISC_FEATURE - X = N or G or K or L
  SITE 10: note = MISC_FEATURE - X = G or H or N
  SITE 11: note = MISC_FEATURE - X = V or P or G
  SITE 12: note = MISC_FEATURE - X = V or P
XAWDDXXXXXXX

SEQ ID NO: 50195 - protein, 13 aa, synthetic construct
  REGION 1..13: note = Synthetic
  SITE 4: note = MISC_FEATURE - X = S or N or C
  SITE 9: note = MISC_FEATURE - X = S or N
  SITE 10: note = MISC_FEATURE - X = N or H
  SITE 11: note = MISC_FEATURE - X = I or T
  SITE 13: note = MISC_FEATURE - X = T or N
SGSXSNIGXXXVX

SEQ ID NO: 50196 - protein, 7 aa, synthetic construct
  REGION 1..7: note = Synthetic
  SITE 1: note = MISC_FEATURE - X = S or G or N or V
  SITE 3: note = MISC_FEATURE - X = D or K or N or Y
XNXQRPS

SEQ ID NO: 50197 - protein, 11 aa, synthetic construct
  REGION 1..11: note = Synthetic
  SITE 1: note = MISC_FEATURE - X = A or T
  SITE 2: note = MISC_FEATURE - X = A or T or V
  SITE 8: note = MISC_FEATURE - X = N or I or S
  SITE 9: note = MISC_FEATURE - X = G or D or V
XXWDDSLXXWV

SEQ ID NO: 50198 - protein, 11 aa, synthetic construct
  REGION 1..11: note = Synthetic
  SITE 2: note = MISC_FEATURE - X = A or T
  SITE 5: note = MISC_FEATURE - X = G or D or R
  SITE 6: note = MISC_FEATURE - X = I or V
  SITE 8: note = MISC_FEATURE - X = N or S
RXSQXXRXDLG

SEQ ID NO: 50199 - protein, 7 aa, synthetic construct
  REGION 1..7: note = Synthetic
  SITE 1: note = MISC_FEATURE - X = A or D or I or T
  SITE 4: note = MISC_FEATURE - X = S or N
  SITE 6: note = MISC_FEATURE - X = Q or E or F or L
XASXLXS

SEQ ID NO: 50200 - skipped

SEQ ID NO: 50201 - protein, 11 aa, synthetic construct
  REGION 1..11: note = Synthetic
  SITE 2: note = MISC_FEATURE - X = A or T
  SITE 5: note = MISC_FEATURE - X = S or N or Y
  SITE 6: note = MISC_FEATURE - X = I or S or F
  SITE 7: note = MISC_FEATURE - X = S or F or N or R or T
  SITE 8: note = MISC_FEATURE - X = S or D or G or R
  SITE 10: note = MISC_FEATURE - X = L or S
  SITE 11: note = MISC_FEATURE - X = N or S
RXSQXXXXYXX

SEQ ID NO: 50202-50203 - skipped (2 entries)

SEQ ID NO: 50204 - protein, 16 aa, synthetic construct
  REGION 1..16: note = Synthetic
  SITE 1: note = MISC_FEATURE - X = K or R
  SITE 2: note = MISC_FEATURE - X = S or T
  SITE 3: note = MISC_FEATURE - X = S or N
  SITE 5: note = MISC_FEATURE - X = S or I
  SITE 6: note = MISC_FEATURE - X = L or F
  SITE 7: note = MISC_FEATURE - X = L or V
  SITE 9: note = MISC_FEATURE - X = S or N or R
  SITE 10: note = MISC_FEATURE - X = E or D
  SITE 12: note = MISC_FEATURE - X = K or R
XXXQXXXHXXGXTYLY

SEQ ID NO: 50205 - protein, 7 aa, synthetic construct
  REGION 1..7: note = Synthetic
  SITE 2: note = MISC_FEATURE - X = V or L
  SITE 4: note = MISC_FEATURE - X = N or K or H
  SITE 6: note = MISC_FEATURE - X = F or L or V
EXSXRXS

SEQ ID NO: 50206 - protein, 12 aa, synthetic construct
  REGION 1..12: note = Synthetic
  SITE 4: note = MISC_FEATURE - X = Q or R
  SITE 5: note = MISC_FEATURE - X = S or G or N
  SITE 6: note = MISC_FEATURE - X = V or I
  SITE 7: note = MISC_FEATURE - X = I or S or G
  SITE 8: note = MISC_FEATURE - X = S or N
  SITE 9: note = MISC_FEATURE - X = S or I or N
  SITE 10: note = MISC_FEATURE - X = Y or F
RASXXXXXXXLA

SEQ ID NO: 50207 - protein, 7 aa, synthetic construct
  REGION 1..7: note = Synthetic
  SITE 2: note = MISC_FEATURE - X = V or A or T
  SITE 4: note = MISC_FEATURE - X = S or N or T
  SITE 5: note = MISC_FEATURE - X = R or W
GXSXXAT

SEQ ID NO: 50208 - skipped

SEQ ID NO: 50209 - protein, 11 aa, synthetic construct
  REGION 1..11: note = Synthetic
  SITE 2: note = MISC_FEATURE - X = A or S
  SITE 5: note = MISC_FEATURE - X = S or D or T
  SITE 6: note = MISC_FEATURE - X = V or I
  SITE 7: note = MISC_FEATURE - X = S or N or R or I
  SITE 8: note = MISC_FEATURE - X = S or I or T
  SITE 9: note = MISC_FEATURE - X = N or Y
  SITE 10: note = MISC_FEATURE - X = L or I
RXSQXXXXXXA

SEQ ID NO: 50210 - protein, 7 aa, synthetic construct
  REGION 1..7: note = Synthetic
  SITE 7: note = MISC_FEATURE - X = T or S
GASTRAX

SEQ ID NO: 50211 - skipped

SEQ ID NO: 50212 - protein, 11 aa, synthetic construct
  REGION 1..11: note = Synthetic
  SITE 1: note = MISC_FEATURE - X = R or Q
  SITE 5: note = MISC_FEATURE - X = G or D
  SITE 7: note = MISC_FEATURE - X = S or N
  SITE 8: note = MISC_FEATURE - X = N or K
  SITE 9: note = MISC_FEATURE - X = Y or F
  SITE 11: note = MISC_FEATURE - X = A or N or V
XASQXIXXXLX

SEQ ID NO: 50213-50214 - skipped (2 entries)

SEQ ID NO: 50215 - protein, 11 aa, synthetic construct
  REGION 1..11: note = Synthetic
  SITE 1: note = MISC_FEATURE - X = S or N
  SITE 3: note = MISC_FEATURE - X = S or N
  SITE 6: note = MISC_FEATURE - X = S or R
XAXQSXGSSLH

SEQ ID NO: 50216 - protein, 7 aa, synthetic construct
  REGION 1..7: note = Synthetic
  SITE 6: note = MISC_FEATURE - X = F or L
YASQSXS

SEQ ID NO: 50217 - protein, 9 aa, synthetic construct
  REGION 1..9: note = Synthetic
  SITE 3: note = MISC_FEATURE - X = S or T
  SITE 4: note = MISC_FEATURE - X = R or G or S
  SITE 5: note = MISC_FEATURE - X = R or S or T
HQXXXLPLT

SEQ ID NO: 50218 - protein, 11 aa, synthetic construct
  REGION 1..11: note = Synthetic
  SITE 4: note = MISC_FEATURE - X = S or T or K
  SITE 7: note = MISC_FEATURE - X = P or N or S or T
  SITE 10: note = MISC_FEATURE - X = A or V
  SITE 11: note = MISC_FEATURE - X = S or N
QGDXLRXYYXX

SEQ ID NO: 50219 - protein, 7 aa, synthetic construct
  REGION 1..7: note = Synthetic
  SITE 1: note = MISC_FEATURE - X = G or A or T
  SITE 4: note = MISC_FEATURE - X = N or S
XKNXRPS

SEQ ID NO: 50220 - protein, 12 aa, synthetic construct
  REGION 1..12: note = Synthetic
  SITE 6: note = MISC_FEATURE - X = S or C
  SITE 7: note = MISC_FEATURE - X = G or Absent
  SITE 8: note = MISC_FEATURE - X = N or G
  SITE 9: note = MISC_FEATURE - X = H or N or S
  SITE 10: note = MISC_FEATURE - X = L or H
  SITE 11: note = MISC_FEATURE - X = V or L
  SITE 12: note = MISC_FEATURE - X = V or L
NSRDSXXXXXXX

SEQ ID NO: 50221 - protein, 16 aa, synthetic construct
  REGION 1..16: note = Synthetic
  SITE 3: note = MISC_FEATURE - X = S or G
  SITE 14: note = MISC_FEATURE - X = Y or S
RSXQSLVYSDGNTXLN

SEQ ID NO: 50222 - protein, 7 aa, synthetic construct
  REGION 1..7: note = Synthetic
  SITE 1: note = MISC_FEATURE - X = K or E
  SITE 4: note = MISC_FEATURE - X = N or K
  SITE 7: note = MISC_FEATURE - X = S or Y
XVSXWDX

SEQ ID NO: 50223 - protein, 9 aa, synthetic construct
  REGION 1..9: note = Synthetic
  SITE 4: note = MISC_FEATURE - X = T or I
  SITE 5: note = MISC_FEATURE - X = H or Absent
  SITE 6: note = MISC_FEATURE - X = W or H
  SITE 7: note = MISC_FEATURE - X = P or L or S or W
  SITE 8: note = MISC_FEATURE - L or P
  SITE 8: note = MISC_FEATURE - X = L or P
MQGXXXXXT

SEQ ID NO: 50224 - protein, 11 aa, synthetic construct
  REGION 1..11: note = Synthetic
  SITE 2: note = MISC_FEATURE - X = A or P or T
  SITE 6: note = MISC_FEATURE - X = V or F
  SITE 7: note = MISC_FEATURE - X = S or R or W
  SITE 8: note = MISC_FEATURE - X = R or I or S
  SITE 9: note = MISC_FEATURE - X = N or D or S
  SITE 10: note = MISC_FEATURE - X = L or V
RXSQSXXXXXA

SEQ ID NO: 50225 - protein, 7 aa, synthetic construct
  REGION 1..7: note = Synthetic
  SITE 1: note = MISC_FEATURE - X = G or D
  SITE 3: note = MISC_FEATURE - X = S or A
  SITE 4: note = MISC_FEATURE - X = T or I or A
XAXXRAT

SEQ ID NO: 50226 - protein, 10 aa, synthetic construct
  REGION 1..10: note = Synthetic
  SITE 4: note = MISC_FEATURE - X = N or Y
  SITE 5: note = MISC_FEATURE - X = N or T or Y
  SITE 6: note = MISC_FEATURE - X = Absent or W
  SITE 7: note = MISC_FEATURE - X = W or P
QQYXXXXPLT

SEQ ID NO: 50227 - protein, 13 aa, synthetic construct
  REGION 1..13: note = Synthetic
HDFWSGYYKGMDV

SEQ ID NO: 50228-50230 - skipped (3 entries)

SEQ ID NO: 50231 - protein, 16 aa, synthetic construct
  REGION 1..16: note = Synthetic
  SITE 1: note = MISC_FEATURE - X = Y or N or F
  SITE 2: note = MISC_FEATURE - X = I or L
  SITE 3: note = MISC_FEATURE - X = F or Y or H
  SITE 4: note = MISC_FEATURE - X = Y or H
  SITE 10: note = MISC_FEATURE - X = Y or N
  SITE 15: note = MISC_FEATURE - X = K or R
XXXXSGSTYXNPSLXS

SEQ ID NO: 50232 - protein, 17 aa, synthetic construct
  REGION 1..17: note = Synthetic
  SITE 11: note = MISC_FEATURE - X = Y or F or H
  SITE 13: note = MISC_FEATURE - X = Y or H
  SITE 15: note = MISC_FEATURE - X = M or L
GDYDGSGSYHXYXGXDV

SEQ ID NO: 50233 - skipped

SEQ ID NO: 50234 - protein, 16 aa, synthetic construct
  REGION 1..16: note = Synthetic
  SITE 2: note = MISC_FEATURE - X = I or S or V
  SITE 4: note = MISC_FEATURE - X = H or I or Q
  SITE 7: note = MISC_FEATURE - X = R or S
  SITE 8: note = MISC_FEATURE - X = T or A or S
  SITE 9: note = MISC_FEATURE - X = N or T
  SITE 10: note = MISC_FEATURE - X = Y or F
EXNXSGXXXXNPSLKS

SEQ ID NO: 50235 - protein, 7 aa, synthetic construct
  REGION 1..7: note = Synthetic
DYGGLDY

SEQ ID NO: 50236 - protein, 14 aa, synthetic construct
  REGION 1..14: note = Synthetic
  SITE 10: note = MISC_FEATURE - X = Y or F
DWGGYSSYYXGMDV

SEQ ID NO: 50237 - skipped

SEQ ID NO: 50238 - protein, 17 aa, synthetic construct
  REGION 1..17: note = Synthetic
  SITE 1: note = MISC_FEATURE - X = V or A
  SITE 4: note = MISC_FEATURE - X = Y or H
  SITE 7: note = MISC_FEATURE - X = S or R
  SITE 8: note = MISC_FEATURE - X = N or D or H
  SITE 9: note = MISC_FEATURE - X = K or R
  SITE 11: note = MISC_FEATURE - X = Y or C or S
  SITE 12: note = MISC_FEATURE - X = A or E or T
XIWXDGXXXYXXDSVKG

SEQ ID NO: 50239-50240 - skipped (2 entries)

SEQ ID NO: 50241 - protein, 17 aa, synthetic construct
  REGION 1..17: note = Synthetic
  SITE 4: note = MISC_FEATURE - X = R or S
  SITE 6: note = MISC_FEATURE - X = S or G
  SITE 7: note = MISC_FEATURE - X = N or S
  SITE 9: note = MISC_FEATURE - X = K or T
  SITE 10: note = MISC_FEATURE - X = Y or H
  SITE 12: note = MISC_FEATURE - X = A or V
  SITE 16: note = MISC_FEATURE - X = K or R or E or Q
YISXSXXTXXYXDSVXG

SEQ ID NO: 50242 - protein, 16 aa, synthetic construct
  REGION 1..16: note = Synthetic
  SITE 2: note = MISC_FEATURE - X = R or S
  SITE 3: note = MISC_FEATURE - X = S or R
  SITE 4: note = MISC_FEATURE - X = G or K
  SITE 5: note = MISC_FEATURE - X = S or G
  SITE 6: note = MISC_FEATURE - X = Y or F
  SITE 7: note = MISC_FEATURE - X = G or Absent
  SITE 8: note = MISC_FEATURE - X = Y or Absent
  SITE 9: note = MISC_FEATURE - X = F or Absent
  SITE 10: note = MISC_FEATURE - X = Y or Absent
  SITE 14: note = MISC_FEATURE - X = L or M
DXXXXXXXXXYYGXDV

SEQ ID NO: 50243 - protein, 16 aa, synthetic construct
  REGION 1..16: note = Synthetic
  SITE 2: note = MISC_FEATURE - X = S or Y
  SITE 7: note = MISC_FEATURE - X = L or V
  SITE 8: note = MISC_FEATURE - X = H or Y
  SITE 9: note = MISC_FEATURE - X = S or N or H
  SITE 10: note = MISC_FEATURE - X = N or S
  SITE 11: note = MISC_FEATURE - X = G or K or R
  SITE 12: note = MISC_FEATURE - X = Y or H or N
  SITE 14: note = MISC_FEATURE - X = Y or H or S
RXSQSLXXXXXXNXLD

SEQ ID NO: 50244 - protein, 7 aa, synthetic construct
  REGION 1..7: note = Synthetic
  SITE 1: note = MISC_FEATURE - X = L or V
  SITE 4: note = MISC_FEATURE - X = N or H
XGSXRAS

SEQ ID NO: 50245 - protein, 10 aa, synthetic construct
  REGION 1..10: note = Synthetic
  SITE 3: note = MISC_FEATURE - X = A or P or T or V
  SITE 5: note = MISC_FEATURE - X = H or Q or Absent
  SITE 6: note = MISC_FEATURE - X = Absent or T
  SITE 7: note = MISC_FEATURE - X = P or Q or T or I
  SITE 8: note = MISC_FEATURE - X = P or T
  SITE 9: note = MISC_FEATURE - X = L or P or F
MQXLXXXXXT

SEQ ID NO: 50246 - skipped

SEQ ID NO: 50247 - protein, 11 aa, synthetic construct
  REGION 1..11: note = Synthetic
  SITE 5: note = MISC_FEATURE - X = G or A
  SITE 7: note = MISC_FEATURE - X = R or G
  SITE 8: note = MISC_FEATURE - X = N or D
RASQXIXXDLG

SEQ ID NO: 50248 - protein, 7 aa, synthetic construct
  REGION 1..7: note = Synthetic
  SITE 2: note = MISC_FEATURE - X = A or T
AXSSLQS

SEQ ID NO: 50249 - protein, 9 aa, synthetic construct
  REGION 1..9: note = Synthetic
  SITE 4: note = MISC_FEATURE - X = Y or N
  SITE 5: note = MISC_FEATURE - X = S or N
  SITE 6: note = MISC_FEATURE - X = Y or F
  SITE 8: note = MISC_FEATURE - X = R or Y
LQHXXXPXS

SEQ ID NO: 50250 - protein, 11 aa, synthetic construct
  REGION 1..11: note = Synthetic
  SITE 3: note = MISC_FEATURE - X = N or D
  SITE 6: note = MISC_FEATURE - X = G or R
  SITE 7: note = MISC_FEATURE - X = R or S
  SITE 8: note = MISC_FEATURE - X = K or R
  SITE 9: note = MISC_FEATURE - X = N or A
GGXNIXXXXVH

SEQ ID NO: 50251 - skipped

SEQ ID NO: 50252 - protein, 11 aa, synthetic construct
  REGION 1..11: note = Synthetic
  SITE 2: note = MISC_FEATURE - X = V or D
  SITE 6: note = MISC_FEATURE - X = Absent or S
  SITE 7: note = MISC_FEATURE - X = Absent or S
  SITE 8: note = MISC_FEATURE - X = S or D or G
  SITE 9: note = MISC_FEATURE - X = T or H
  SITE 10: note = MISC_FEATURE - X = V or A or G
QXWDSXXXXXV

SEQ ID NO: 50253 - skipped

SEQ ID NO: 50254 - protein, 17 aa, synthetic construct
  REGION 1..17: note = Synthetic
  SITE 1: note = MISC_FEATURE - X = I or V or A
  SITE 2: note = MISC_FEATURE - X = I or M
  SITE 7: note = MISC_FEATURE - X = S or T
  SITE 8: note = MISC_FEATURE - X = N or Y or S
  SITE 12: note = MISC_FEATURE - X = A or G or T or V
XXWYDGXXKYYXDSVKG

SEQ ID NO: 50255 - skipped

SEQ ID NO: 50256 - protein, 11 aa, synthetic construct
  REGION 1..11: note = Synthetic
  SITE 5: note = MISC_FEATURE - X = S or N
  SITE 8: note = MISC_FEATURE - X = S or N
  SITE 9: note = MISC_FEATURE - X = S or N or T
RASQXIGXXLH

SEQ ID NO: 50257 - protein, 7 aa, synthetic construct
  REGION 1..7: note = Synthetic
  SITE 1: note = MISC_FEATURE - X = Y or S
XASQSFS

SEQ ID NO: 50258 - protein, 9 aa, synthetic construct
  REGION 1..9: note = Synthetic
  SITE 1: note = MISC_FEATURE - X = H or Q
  SITE 4: note = MISC_FEATURE - X = S or G or R
  SITE 6: note = MISC_FEATURE - X = L or F
  SITE 8: note = MISC_FEATURE - X = W or R or Q
XQSXSXPXT

SEQ ID NO: 50259 - protein, 17 aa, synthetic construct
  REGION 1..17: note = Synthetic
  SITE 8: note = MISC_FEATURE - X = N or S or Q
  SITE 9: note = MISC_FEATURE - X = T or A or V
WMYPNSGXXGYAQKFQG

SEQ ID NO: 50260 - protein, 17 aa, synthetic construct
  REGION 1..17: note = Synthetic
  SITE 8: note = MISC_FEATURE - X = N or S or Q
  SITE 9: note = MISC_FEATURE - X = T or A or E
WMHPNSGXXGYAQKFQG

SEQ ID NO: 50261 - protein, 9 aa, synthetic construct
  REGION 1..9: note = Synthetic
  SITE 5: note = MISC_FEATURE - X = N or Q
  SITE 6: note = MISC_FEATURE - X = T or A
QQYYXXPVT

SEQ ID NO: 50262 - protein, 8 aa, synthetic construct
  REGION 1..8: note = Synthetic
  SITE 1: note = MISC_FEATURE - X = D or S
  SITE 2: note = MISC_FEATURE - X = G or A
XXTSSFDY

SEQ ID NO: 50263 - protein, 17 aa, synthetic construct
  REGION 1..17: note = Synthetic
  SITE 5: note = MISC_FEATURE - X = D or S or E
  SITE 6: note = MISC_FEATURE - X = G or A
  SITE 13: note = MISC_FEATURE - X = D or E
  SITE 14: note = MISC_FEATURE - X = S or A
IIWHXXSNKYYAXXVKG

SEQ ID NO: 50264 - protein, 17 aa, synthetic construct
  REGION 1..17: note = Synthetic
  SITE 6: note = MISC_FEATURE - X = G or A
  SITE 13: note = MISC_FEATURE - X = D or E or G
  SITE 14: note = MISC_FEATURE - X = S or A
VIWYDXSNKYYAXXVKG

SEQ ID NO: 50265 - protein, 14 aa, synthetic construct
  REGION 1..14: note = Synthetic
  SITE 7: note = MISC_FEATURE - X = W or F
EVYSSGXYDYGMDV

SEQ ID NO: 50266 - protein, 118 aa, synthetic construct; identical to SEQ ID NO: 29778
  REGION 1..118: note = Synthetic

SEQ ID NO: 50267 - protein, 123 aa, synthetic construct
  REGION 1..123: note = Synthetic
QVQLVESGGGVVQPGRSLRLSCAASGFTFSSYVMHWVRQAPGKGLEWVAVIWYDGSNKYYADSVKGRFTISRDNSKNTLYLQMNSLRAEDTAVYYCARERYSSGWYDYGMDVWGQGTTVTVSS

SEQ ID NO: 50268 - protein, 116 aa, synthetic construct
  REGION 1..116: note = Synthetic
QVQLVESGGGVVQPGRSLRLSCAASGFTFSDYGMHWVRQAPGKGLEWVAVIWYDENNKYYADSVKGRFTISRDNSKNTLYLQMNSLRAEDTAVYYCARELGFSDYWGQGTLVTVSS

SEQ ID NO: 50269 - protein, 115 aa, synthetic construct; identical to SEQ ID NO: 29738
  REGION 1..115: note = Synthetic

SEQ ID NO: 50270 - protein, 118 aa, synthetic construct; identical to SEQ ID NO: 29808
  REGION 1..118: note = Synthetic

SEQ ID NO: 50271 - protein, 120 aa, synthetic construct
  REGION 1..120: note = Synthetic
QVQLVESGGGVVQPGRSLRLSCAASGFTFSSYGMHWVRQAPGKGLEWVAVIWYDGSNKNYADSVKGRFTISRDNSKNTLYLQMNSLRAEDTAVYYCARDQGVGYYGLDVWGQGTTVTVSS

SEQ ID NO: 50272 - protein, 117 aa, synthetic construct
  REGION 1..117: note = Synthetic
QVQLVQSGAEVKKPGASVKVSCKASGYTFTGYYMHWVRQAPGQGLEWMGWINPNSGGTNYAQKFQGRVTMTRDTSISTAYMELSRLRSDDTAVYYCARDGTSSFDYWGQGTLVTVSS

SEQ ID NO: 50273 - protein, 118 aa, synthetic construct; identical to SEQ ID NO: 28996
  REGION 1..118: note = Synthetic

SEQ ID NO: 50274 - protein, 117 aa, synthetic construct
  REGION 1..117: note = Synthetic
QVQLVESGGGVVQPGRSLRLSCAASGFTFSDYGMHWVRQAPGKGLEWVAVIWYDESNKYYADSVKGRFTISRDNSKNTLYLQMNSLRAEDTAVYYCAREVGWLDDYWGQGTLVTVSS

SEQ ID NO: 50275 - protein, 114 aa, synthetic construct
  REGION 1..114: note = Synthetic
EVQLVESGGGLVKPGGSLRLSCAASGFTFSSYSMNWVRQAPGKGLEWVSSISGSSSYIYYADSVKGRFTISRDNAKNSLYLQMNSLRAEDTAVYYCARDRGSSWGQGTLVTVSS

SEQ ID NO: 50276 - protein, 121 aa, synthetic construct; identical to SEQ ID NO: 28502
  REGION 1..121: note = Synthetic

SEQ ID NO: 50277 - protein, 123 aa, synthetic construct; identical to SEQ ID NO: 29132
  REGION 1..123: note = Synthetic

SEQ ID NO: 50278 - protein, 129 aa, synthetic construct
  REGION 1..129: note = Synthetic
QVQLVESGGGVVQPGRSLRLSCAASGFTFSSYGMHWVRQAPGKGLEWVAVIWYDGSNKYYADSVKGRFTISRDNSKNTLYLQMNSLRAEDTAVYYCARDRVYCSSTSCPYYYYYGMDVWGQGTTVTVSS

SEQ ID NO: 50279 - protein, 115 aa, synthetic construct
  REGION 1..115: note = Synthetic
EVQLVESGGGLVKPGGSLRLSCAASGFTFSSYSMNWVRQAPGKGLEWVSSISGSSSYIYYADSVKGRFTISRDNAKNSLYLQMNSLRAEDTAVYYCARVASFDYWGQGTLVTVSS

SEQ ID NO: 50280 - protein, 127 aa, synthetic construct; identical to SEQ ID NO: 30630
  REGION 1..127: note = Synthetic

SEQ ID NO: 50281 - protein, 121 aa, synthetic construct; identical to SEQ ID NO: 31304
  REGION 1..121: note = Synthetic

SEQ ID NO: 50282 - protein, 121 aa, synthetic construct
  REGION 1..121: note = Synthetic
QVQLVESGGGVVQPGRSLRLSCAASGFTFSSYGMHWVRQAPGKGLEWVAIIWYDGSNKYYADSVKGRFTISRDNSKNTLYLQMNSLRAEDTAVYYCARDHYDFWSGHFDYWGQGTLVTVSS

SEQ ID NO: 50283 - protein, 115 aa, synthetic construct
  REGION 1..115: note = Synthetic
QVQLQQWGAGLLKPSETLSLTCAVYGGSFSGYYWSWIRQPPGKGLEWIGEINHSGRTNYNPSLKSRVTISVDTSKNQFSLKLSSVTAADTAVYYCARDYGGLDYWGQGTLVTVSS

SEQ ID NO: 50284 - protein, 119 aa, synthetic construct
  REGION 1..119: note = Synthetic
QLQLQESGPGLVKPSETLSLTCTVSGGSISRSSYYWGWIRQPPGKGLEWIGNIYYSGSTYYNPSLKSRVTISVDTSKNQFSLKLSSVTAADTAVYYCARHSSSWSLDYWGQGTLVTVSS

SEQ ID NO: 50285 - protein, 120 aa, synthetic construct
  REGION 1..120: note = Synthetic
QVQLVQSGAEVKKPGASVKVSCKASGYTFTGYYIHWVRQAPGQGLEWMGWINPNSGGTNYAQKFQGRVTMTRDTSISTAYMELSRLRSDDTAVYYCARGYSYGYNWFDPWGQGTLVTVSS

SEQ ID NO: 50286 - protein, 119 aa, synthetic construct
  REGION 1..119: note = Synthetic
QVQLVESGGGVVQPGRSLRLSCAASGFTFSHYGMHWVRQAPGKGLEWVAVIWYDGSNKYYADSVKGRFTISRDNSKNTLYLQMNSLRAEDTAVYYCARGDWNPEGMDVWGQGTTVTVSS

SEQ ID NO: 50287 - protein, 123 aa, synthetic construct; identical to SEQ ID NO: 30234
  REGION 1..123: note = Synthetic

SEQ ID NO: 50288 - protein, 124 aa, synthetic construct
  REGION 1..124: note = Synthetic
QVQLVQSGAEVKKPGASVKVSCKASGYTFTGYYMHWVRQAPGQGLEWMGWINPNSGGTNYAQKFQGRVTMTRDTSISTAYMELSRLRSDDTAVYYCARSYYYGSGSYYNEFDYWGQGTLVTVSS

SEQ ID NO: 50289 - protein, 123 aa, synthetic construct; identical to SEQ ID NO: 31196
  REGION 1..123: note = Synthetic

SEQ ID NO: 50290 - protein, 114 aa, synthetic construct
  REGION 1..114: note = Synthetic
EVQLVESGGGLVKPGGSLRLSCAASGFTFSSYSMNWVRQAPGKGLEWVSSISGSSSYIYYADSVKGRFTISRDNAKNSLYLQMNSLRAEDTAVYYCARLTFDYWGQGTLVTVSS

SEQ ID NO: 50291 - protein, 122 aa, synthetic construct
  REGION 1..122: note = Synthetic
QVQLVESGGGVVQPGRSLRLSCAASGFTFSTYGMHWVRQAPGKGLEWVAIIWYDGTNKYYADSVKGRFTISRDNSKNTLYLQLNSLRAEDTAVYYCARDPLRGYNDPVMDYWGQGTLVTVSS

SEQ ID NO: 50292 - protein, 122 aa, synthetic construct; identical to SEQ ID NO: 30134
  REGION 1..122: note = Synthetic

SEQ ID NO: 50293 - protein, 129 aa, synthetic construct
  REGION 1..129: note = Synthetic
QVQLVESGGGVVQPGRSLRLSCAASGFTFSTYGMHWVRQAPGKGLEWVAVIWYGGSNKDYADSVKGRFTISRDISKNTLYLQMNSLRAEDTAVYYCARDRDYCSGGSCPYYYYYGMDVWGQGTTVTVSS

SEQ ID NO: 50294 - protein, 119 aa, synthetic construct
  REGION 1..119: note = Synthetic
QLQLQESGPGLVKPSETLSLTCTVSGGSISRSSYYWGWIRQPPGKGLEWIGNIYYSGSTYYNPSLKSRVTISVDTSKNQFSLKLSSVTAADTAVYYCGRHGKDWGLDYWGQGTLVTVSS

SEQ ID NO: 50295 - protein, 124 aa, synthetic construct
  REGION 1..124: note = Synthetic
QVQLVQSGAEVKKPGASVKVSCKASGYTFTGYYMHWVRQAPGQGLEWMGWIKPNSGGTNQAQKFQGRVTMTRDTSISTAYMELSGLRSDDTAVYYCARAPGTAAAGTWGYFDYWGQGTLVTVSS

SEQ ID NO: 50296 - protein, 118 aa, synthetic construct
  REGION 1..118: note = Synthetic
QITLKESGPTLVKPTQTLTLTCTFSGFSLSTGGVGVGWIRQPPGKALEWLALIYWDDDKRYSPSLKSRLTITKDTSKNQVVLTMTNMDPVDTATYYCAHLIAVAFDYWGQGTLVTVSS

SEQ ID NO: 50297 - protein, 121 aa, synthetic construct
  REGION 1..121: note = Synthetic
QVQLVESGGGVVQPGRSLRLSCAASGFTFSSYGMHWVRQAPGKGLEWVAIIWYDGSYKYYADSVKGRFTISRDNSKNTLYLQMNSLRAEDTAVYYCAREAYDFWSGYFDYWGQGTLVTVSS

SEQ ID NO: 50298 - protein, 120 aa, synthetic construct
  REGION 1..120: note = Synthetic
QVQLVESGGGVVQPGRSLRLSCAASGFTFSSYGMHWVRQAPGKGLEWVAVIWYDGSNKYYADSVKGRFTISRDNSKNTLYLQMNSLRAEDTAVYYCARDRDYGDYGMDVWGQGTTVTVSS

SEQ ID NO: 50299 - protein, 121 aa, synthetic construct
  REGION 1..121: note = Synthetic
EVQLLESGGGLVQPGGSLRLSCAASGFTFSSYAMSWVRQAPGKGLEWVSAISGSGGNTFYADSVKGRFTISRDNSKNTLYLQMNSLRAEDTAVYYCAKLGKDYYYYGMDVWGQGTTVTVSS

SEQ ID NO: 50300 - protein, 115 aa, synthetic construct
  REGION 1..115: note = Synthetic
EVQLLESGGGLVQPGGSLRLSCAASGFTFSSYVMSWVRQAPGKGLEWVSAMSGSGGRTYYADSVKGRFTISRDNSKNTLYLQMNSLRAEDTAVYYCAKLTAFDYWGQGTLVTVSS

SEQ ID NO: 50301 - protein, 121 aa, synthetic construct
  REGION 1..121: note = Synthetic
QVQLVESGGGVVQPGRSLRLSCAASGFTFSSYGMHWVRQAPGKGLEWVAIISYAGSNKYYADSVKGRFTISRDNSKNTLYLQMNSLRAEDTAVYYCVRRGYSYGGYGMDVWGQGTTVTVSS

SEQ ID NO: 50302 - protein, 123 aa, synthetic construct
  REGION 1..123: note = Synthetic
QVQLVESGGGVVQPGRSLRLSCAASGFTFSDYVMHWVRQAPGKGLEWVAVIWYDGSNKYYADSVKGRFTISRDNSKNTLYLQMNSLRAEDTAVYYCAREPYTSGWYDYGMDVWGQGTTVTVSS

SEQ ID NO: 50303 - protein, 122 aa, synthetic construct; identical to SEQ ID NO: 31476
  REGION 1..122: note = Synthetic

SEQ ID NO: 50304 - protein, 118 aa, synthetic construct
  REGION 1..118: note = Synthetic
EVQLLESGGGLVQPGGSLRLSCAASGFTFSSYAMSWVRQAPGKGLEWVSAISGRGGNTFDADSVKGRFTISRDNSKNTLYLQMNSLRAEDTAVYYCAKERSGSYFDYWGQGTLVTVSS

SEQ ID NO: 50305 - protein, 119 aa, synthetic construct; identical to SEQ ID NO: 28704
  REGION 1..119: note = Synthetic

SEQ ID NO: 50306 - protein, 119 aa, synthetic construct; identical to SEQ ID NO: 31524
  REGION 1..119: note = Synthetic

SEQ ID NO: 50307 - protein, 115 aa, synthetic construct
  REGION 1..115: note = Synthetic
EVQLLESGGGLVQPGGSLRLSCAASGFTFSSYVMNWVRQAPGKGLEWVSAISGSGGRTYYADSVKGRFTISRDNSKNTLYLQMNSLRAEDTAVYYCARTATFDYWGQGTLVTVSS

SEQ ID NO: 50308 - protein, 118 aa, synthetic construct
  REGION 1..118: note = Synthetic
EVQLLESGGGLVQPGGSLRLSCAASGFTFSSYAMSWVRQAPGKGLEWVSVISGRGGTTFYADSVKGRFTISRDNSKNTLYLQMNSLRAEDTAVYYCAKRTPSDVFDIWGQGTMVTVSS

SEQ ID NO: 50309 - protein, 119 aa, synthetic construct
  REGION 1..119: note = Synthetic
QVQLVESGGGVVQPGRSLRLSCAASGFTFSSYGMHWVRQAPGKGLEWVAVIWYDGSNKYYADSVKGRFTISRDNSKNTLYLQMNSLRAEDTAVYYCARDRPRSSAFDYWGQGTLVTVSS

SEQ ID NO: 50310 - protein, 125 aa, synthetic construct
  REGION 1..125: note = Synthetic
EVQLVESGGGLVQPGGSLRLSCAASGFTFSSYNMNWVRQAPGKGLEWVSYISRSSNTKYYADSVKGRFTISRDNAKNSLYLQMNSLRDEDTAVYYCARDRSGSYGYFYYYGLDVWGQGTTVTVSS

SEQ ID NO: 50311 - protein, 119 aa, synthetic construct
  REGION 1..119: note = Synthetic
QVQLQESGPGLVKPSQTLSLTCTVSGGSIRSGGDYWSWIRQHPGKGLEWIGYIYYSGSTYYNPSLKSRVTISVDTSKNQFSLKLSSVTAADTAVYYCARDSSSYGMDVWGQGTTVTVSS

SEQ ID NO: 50312 - protein, 108 aa, synthetic construct
  REGION 1..108: note = Synthetic
DIQMTQSPSSLSASVGDRVTITCRASQGIRNDLGWYQQKPGKAPKRLIYAASSLQSGVPSRFSGSGSGTEFTLTISSLQPEDFATYYCLQHNSYPLTFGGGTKVEIKR

SEQ ID NO: 50313 - protein, 107 aa, synthetic construct
  REGION 1..107: note = Synthetic
SYELTQPPSVSVSPGQTASITCSGDKLGDKYACWYQQKPGQSPVLVIYQDRKRPSGIPERFSGSNSGNTATLTISGTQAMDEADYYCQAWDSSTVVFGGGTKLTVLG

SEQ ID NO: 50314 - protein, 109 aa, synthetic construct
  REGION 1..109: note = Synthetic
EIVLTQSPGTLSLSPGERATLSCRASQSVYSSYLAWYQQKPGQAPRLLIYGASSRATGIPDRFSGSGSGTDFTLTISRLEPEDFAVYYCQQYDNSPWTFGQGTKVEIKR

SEQ ID NO: 50315 - protein, 108 aa, synthetic construct
  REGION 1..108: note = Synthetic
DIQMTQSPSSLSASVGDRVTITCRASQGIRNDLGWYQQKPGKAPKRLIYAASSLQSGVPSRFSGSGSGTEFTLTISSLQPEDFATYYCLQHYSYPRTFGQGTKVEIKR

SEQ ID NO: 50316 - protein, 114 aa, synthetic construct
  REGION 1..114: note = Synthetic
DIVMTQSPDSLAVSLGERATINCKSSQSVLHSSNNNNYLAWYQQKPGQPPKLLIYWASTRESGVPDRFSGSGSGTDFTLTISSLQAEDVAVYYCQQYYSTPPTFGQGTKVEIKR

SEQ ID NO: 50317 - protein, 108 aa, synthetic construct
  REGION 1..108: note = Synthetic
DIQMTQSPSSLSASVGDRVTITCRASQGIRNDLGWYQQKPGKAPKRLIYAASSLQSGVPSRFSGSGSGTEFTLTISSLQPEDFATYYCLQHNSYPFTFGPGTKVDIKR

SEQ ID NO: 50318 - protein, 108 aa, synthetic construct
  REGION 1..108: note = Synthetic
DIQMTQSPSSLSASVGDRVTITCRASQGISNYLAWFQQKPGKAPKSLIYAASSLQSGVPSKFSGSGSGTDFTLTISSLQPEDFATYYCQQYSTYPLTFGGGTKVEIKR

SEQ ID NO: 50319 - protein, 108 aa, synthetic construct
  REGION 1..108: note = Synthetic
DIQMTQSPSSLSASVGDRVTITCRASQNIISYLNWYQQKPGKAPKLLIYTASSLQSGVPSRFSGSGSGTDFTLTISSLQPEDFATYYCQQSYSTPLTFGGGTKVEIKR

SEQ ID NO: 50320 - protein, 108 aa, synthetic construct
  REGION 1..108: note = Synthetic
DIQMTQSPSSLSASVGDRVTITCRASQGISNYLAWFQQKPGKAPKSLIYAASSLQSGVPSKFSGSGSGTDFTLTISSLQPEDFATYYCQQYNSYPFTFGPGTKVDIKR

SEQ ID NO: 50321 - protein, 108 aa, synthetic construct
  REGION 1..108: note = Synthetic
DIQMTQSPSSVSASVGDRVTITCRASQGISRWLAWYQQKPGKAPKLLIYAASSLQSGVPSRFSGSGSGTDFTLTISSLQPEDFATYYCQQANSFPFTFGPGTKVDIKR

SEQ ID NO: 50322 - protein, 113 aa, synthetic construct
  REGION 1..113: note = Synthetic
DIVMTQTPLSLSVTPGQPASISCKSSQSLLHGDGKTYLYWYLQKPGQPPQLLIYEVSNRFSGVPDRFSGSGSGTDFTLKISRVEAEDVGVYYCMQSIQLPWTFGQGTKVEIKR

SEQ ID NO: 50323 - protein, 108 aa, synthetic construct
  REGION 1..108: note = Synthetic
DIQMTQSPSSLSASVGDRVTITCRASQSISSYLNWYQQKPGKAPKLLIYAASSLQSGVPSRFSGSGSGTDFTLTISSLQPEDFATYYCQQSYSPPFTFGPGTKVDIKR

SEQ ID NO: 50324 - protein, 114 aa, synthetic construct
  REGION 1..114: note = Synthetic
DIVMTQSPDSLAVSLGERATINCKSSQSVLYSSNNNNYLAWYQQKPGQPPKLLIYWASTRESGVPDRFSGSGSGTDFTLTISSLQAEDVAVYYCQQYYSTPCSFGQGTKLEIKR

SEQ ID NO: 50325 - protein, 108 aa, synthetic construct
  REGION 1..108: note = Synthetic
DIQMTQSPSSVSASVGDRVTITCRASQGISNWLAWYQQKPGKAPKLLIYAASSLQSGVPSRFSGSGSGTDFTLTISSLQPEDFATYYCQQANSFPWTFGQGTKVEIKR

SEQ ID NO: 50326 - protein, 114 aa, synthetic construct
  REGION 1..114: note = Synthetic
DIVMTQSPDSLAVSLGERATINCKSSQSVLHSSNNNNYLAWYQQKPGQPPKLLIYWASTRESGVPDRFSGSGSGTDFTLTISSLQAEDVAVYYCQQYYSTPVTFGPGTKVDIKR

SEQ ID NO: 50327 - protein, 111 aa, synthetic construct
  REGION 1..111: note = Synthetic
QTVVTQEPSLTVSPGGTVTLTCASSTGAVTSGYYPNWFQQKPGQAPRALIYSTSNKHSWTPARFSGSLLGGKAALTLSGVQPEDEAEYYCLLYYGGAQLVFGGGTKLTVLG

SEQ ID NO: 50328 - protein, 108 aa, synthetic construct
  REGION 1..108: note = Synthetic
EIVMTQSPATLSVSPGERATLSCRASQSVNSNLAWYQQKPGQAPRLLIYGASTRATGIPARFSGSGSGTEFTLTISSLQSEDFAVYYCQQYNDWPCSFGQGTKLEIKR

SEQ ID NO: 50329 - protein, 109 aa, synthetic construct
  REGION 1..109: note = Synthetic
EFMLTQSPGTLSLSPGERATLSCRASQSVSSSYLVWYQQKPGQAPRLLIYGASTRATGIPDRFSGSGSGTDFTLTISRLEPEYFAVYYCQQYGCSPLTFGGGTKVEITR

SEQ ID NO: 50330 - protein, 113 aa, synthetic construct
  REGION 1..113: note = Synthetic
DIVMTQTPLSLSVTPGQPASISCKSSQSLLHSEGKTYLYWYLQKPGQPPQLLIYEVSNRFSGVPDRFSGSGSGTDFTLKISRVEAEDVGVYYCMQSIQLPLTFGGGTKVEIKR

SEQ ID NO: 50331 - protein, 111 aa, synthetic construct
  REGION 1..111: note = Synthetic
QSALTQPASVSGSPGQSITISCTGTSSDVGGYNYVSWYQQHPGKAPKLMIYEVSNRPSGVSNRFSGSKSGNTASLTISGLQAEDEADYYCNSYTRSITWVFGGGTKLTVLG

SEQ ID NO: 50332 - protein, 109 aa, synthetic construct
  REGION 1..109: note = Synthetic
DIQMTQSPSSLSASVGDRVTITCRASQSISNYLNWYQQKPGKAPKLLIYAASSLQSGVPSRFSGSGSGTDFTLTISSLQPEDFATYYCQQSYSTPTWTFGQGTKVEIKR

SEQ ID NO: 50333 - protein, 108 aa, synthetic construct
  REGION 1..108: note = Synthetic
DIQMTQSPSSVSASVGDRVTITCRASQGISSWLAWYQQKPGKAPKLLIYAASSLQSGVPSRFSGSGSGTDFTLTISSLQPEDFATYYCQQINSFPLTFGGGTKVEIKR

SEQ ID NO: 50334 - protein, 108 aa, synthetic construct
  REGION 1..108: note = Synthetic
DIQMTQSPSSLSASVGDRVTITCQASQDINNYLNWYQQKPGKAPKLLIYDASNLETGVPSRFSGSGSGTDFTFTISSLQPEDIATYYCQQYDNLPITFGQGTRLEIKR

SEQ ID NO: 50335 - protein, 111 aa, synthetic construct
  REGION 1..111: note = Synthetic
QSVLTQPPSVSAAPGQKVTISCSGSSSNIGNNYVSWYQQLPGTAPKLLIYDNNKRPSGIPDRFSGSKSGTSATLGITGLQTGDEADYYCGTWDSSLSVGVFGGGTKLTVLG

SEQ ID NO: 50336 - protein, 113 aa, synthetic construct
  REGION 1..113: note = Synthetic
DIVMTQSPLSLPVTPGEPASISCRSSQSLLHSNGYNYLDWYLQKPGQSPQLLIYLGSNRASGVPDRFSGSGSGTDFTLKISRVEAEDVGVYYCMQALHPPLTFGGGTKVEIKR

SEQ ID NO: 50337 - protein, 111 aa, synthetic construct
  REGION 1..111: note = Synthetic
QSVLTQPPSASGTPGQRVTISCSGSSSNIGSNTVNWYQQLPGTAPKLLIYSNNQRPSGVPDRFSGSKSGTSASLAISGLQSEDEADYYCAAWDDSLNGVVFGGGTKLTVLG

SEQ ID NO: 50338 - protein, 111 aa, synthetic construct
  REGION 1..111: note = Synthetic
QSVLTQPPSASGTPGQRVTISCSGSSSNIGSNIVTWYQQLPGTAPKLLIYSNDQRPSGVPDRFSGSKSGTSASLAISGLQSEDEADYYCAAWDDSLNGWVFGGGTTLTVLG

SEQ ID NO: 50339 - protein, 108 aa, synthetic construct
  REGION 1..108: note = Synthetic
DIQMTQSPSSLSASVGDRVTITCRASQGIRNDLGWYQQKPGKAPKRLIYAASSLQSGVPSRFSGSGSGTEFTLTISSLQPEDFATYYCLQHNSYPITFGQGTRLEIKR

SEQ ID NO: 50340 - protein, 108 aa, synthetic construct
  REGION 1..108: note = Synthetic
DIQMTQSPSSLSASVGDRVTITCRASQSISSYLNWYQQKPGKAPKLLIYAASSLQSGVPSRFSGSGSGTDFTLTISSLQPEDFATYYCQQSYSIPITFGQGTRLEIKR

SEQ ID NO: 50341 - protein, 113 aa, synthetic construct
  REGION 1..113: note = Synthetic
DIVMTQTPLSLSVTPGQPASISCKSSQSLLHSEGKTYLYWYLQKPGQPPQLLIYEVSNRFSGVPDRFSGSGSGTDFTLKISRVEAEDVGVYYCMQSIQLPITFGQGTRLEIKR

SEQ ID NO: 50342 - protein, 109 aa, synthetic construct
  REGION 1..109: note = Synthetic
EIVLTQSPGTLSLFPGERATLSCRASQSVISSYLAWYQQKPGQAPRLLIFGVSSRATGIPDRFSGSGSGTDFTLTISRLEPEDFAVYYCQQYGRSPFNFGPGTKVDIKR

SEQ ID NO: 50343 - protein, 108 aa, synthetic construct
  REGION 1..108: note = Synthetic
EIVMTQSPATLSVSPGERATLSCRASQSVSSNLAWYQQKPGQAPRLLIYGASTRATGIPARFSGSGSGTEFTLTISSLQSEDFAVYYCQQYNDWPWTFGQGTKVEIKR

SEQ ID NO: 50344 - protein, 108 aa, synthetic construct
  REGION 1..108: note = Synthetic
EIVLTQSPDFQSVTPKEKVTITCRASQSIGSSLHWYQQKPDQSPKLLIKYASQSFSGVPSRFSGSGSGTDFTLTINSLEAEDAATYYCHQSSSLPWTFGQGTKVEIKR

SEQ ID NO: 50345 - protein, 108 aa, synthetic construct
  REGION 1..108: note = Synthetic
DIQMTQSPSSLSASVGDRVTITCRASQGIRNDLGWYQQKPGKAPKRLIYAASSLQSGVPSRFSGSGSGTEFTLTISSLQPEDFATYYCLQHYSYPRSFGQGTKLEIKR

SEQ ID NO: 50346 - protein, 108 aa, synthetic construct
  REGION 1..108: note = Synthetic
DIQMTQSPSSLSASVGDRVTITCRASQGISNYLAWFQQKPGKAPKSLIYAASSLQSGVPSKFSGSGSGTDFTLTISSLQPEDFATYYCQQYLSYPITFGQGTRLEIKR

SEQ ID NO: 50347 - protein, 108 aa, synthetic construct
  REGION 1..108: note = Synthetic
EIVLTQSPDFQSVTPKEKVTITCRASQSIGSSLHWYQQKPDQSPKLLIKYASQSFSGVPSRFSGSGSGTDFTLTINSLEAEDAATYYCHQSRRLPLTFGGGTKVEIKR

SEQ ID NO: 50348 - protein, 110 aa, synthetic construct
  REGION 1..110: note = Synthetic
SSELTQDPAVSVALGQTVRITCQGDSLRPYYASWYQQKPGQAPVLVIYGKNNRPSGIPDRFSGSSSGNTASLTITGAQAEDEADYYCNSRDSSGNHLVVFGGGTKLTVLG

SEQ ID NO: 50349 - protein, 113 aa, synthetic construct
  REGION 1..113: note = Synthetic
DVVMTQSPLSLPVTLGQPASISCRSSQSLVYSDGNTYLNWFQQRPGQSPRRLIYKVSNWDSGVPDRFSGSGSGTDFTLKISRVEAEDVGVYYCMQGTHWPLTFGGGTKVEIKR

SEQ ID NO: 50350 - protein, 108 aa, synthetic construct
  REGION 1..108: note = Synthetic
EIVMTQSPATLSVSPGERATLSCRASQSVSRNLAWYQQKPGQAPRLLIYGASTRATGIPARFSGSGSGTEFTLTISSLQSEDFAVYYCQQYNNWPLTFGGGTKVEIKR

SEQ ID NO: 50351 - protein, 107 aa, synthetic construct
  REGION 1..107: note = Synthetic
SYELTQPLSVSVALGQTARITCGGNNIGRKNVHWYQQKPGQAPVLVIYRDSDRPSGIPERFSGSNSGNTATLTISRAQAGDEADYYCQVWDSSTVVFGGGTKLTVLG

SEQ ID NO: 50352 - protein, 117 aa, synthetic construct
  REGION 1..117: note = Synthetic
QVQLVQSGAEVKKPGASVKVSCKASGYTFTDYYMHWVRQAPGQGLEWMGWINPNNGGTNYAQKFQGRVTMTRDTSISTAYMELSRLRSDDTAVYYCARDGTGSFDYWGQGTLVTVSS

SEQ ID NO: 50353 - protein, 124 aa, synthetic construct; identical to SEQ ID NO: 50288
  REGION 1..124: note = Synthetic

SEQ ID NO: 50354 - protein, 118 aa, synthetic construct; identical to SEQ ID NO: 29778
  REGION 1..118: note = Synthetic

SEQ ID NO: 50355 - protein, 115 aa, synthetic construct; identical to SEQ ID NO: 50279
  REGION 1..115: note = Synthetic

SEQ ID NO: 50356 - protein, 114 aa, synthetic construct; identical to SEQ ID NO: 28608
  REGION 1..114: note = Synthetic

SEQ ID NO: 50357 - protein, 115 aa, synthetic construct
  REGION 1..115: note = Synthetic
EVQLLESGGGLVQPGGSLRLSCAASGFTFSSYVMNWVRQAPGKGLEWVSAISGSGGSTYYADSVKGRFTISRDNSKNTLYLQMNSLRAEDTAVYYCARTGVFDYWGQGTLVTVSS

SEQ ID NO: 50358 - protein, 123 aa, synthetic construct; identical to SEQ ID NO: 29132
  REGION 1..123: note = Synthetic

SEQ ID NO: 50359 - protein, 121 aa, synthetic construct
  REGION 1..121: note = Synthetic
  MOD_RES 35: note = Any amino acid
EVQLLESGGGLVQPGGSLRLSCAASEFTFSSYAMXWVRQAPGKGLEWVSVISGRGGNTFYADSVKGRFTISRDNSKNTLYLQMNSLRAEDTAVYYCASRLAVAGSEAFDIWGQGTMVTVSS

SEQ ID NO: 50360 - protein, 118 aa, synthetic construct
  REGION 1..118: note = Synthetic
  MOD_RES 53: note = Any amino acid
QVQLVESGGGVVQPGRSLRLSCAASGFTFSSYGMHWVRQAPGKGLEWVAVIWXDGSNKYYADSVKGRFTISRDNSKNTLYLQMNSLRAEDTAVYYCARDLSMGGMDVWGQGTTVTVSS

SEQ ID NO: 50361 - protein, 123 aa, synthetic construct
  REGION 1..123: note = Synthetic
QVQLVESGGGVVQPGRSLRLSCAASGFTFSSYVMHWVRQAPGKGLEWVAVIWYDGSNKYYADSVKGRFTISRDNSKNTLYLQMNSLRAEDTAVYYCAREKYSSSWYDYGMDVWGQGTTVTVSS

SEQ ID NO: 50362 - protein, 117 aa, synthetic construct
  REGION 1..117: note = Synthetic
QVQLVESGGGVVQPGRSLRLSCAASGFTFSDYGMHWVRQAPGKGLEWVAVIWYDESNKYYADSVKGRFTISRDNSKNTLYLQMNSLRAEDTAVYYCAREIGWLDDYWGQGTLVTVSS

SEQ ID NO: 50363 - protein, 117 aa, synthetic construct
  REGION 1..117: note = Synthetic
QVQLVESGGGVVQPGRSLRLSCAASGFTFSDYGMHWVRQAPGKGLEWVAVIWYDENNKYYADSVKGRFTISRDNSKNTLYLQMNSLRAEDTAVYYCARELGFRSDYWGQGTLVTVSS

SEQ ID NO: 50364 - protein, 119 aa, synthetic construct; identical to SEQ ID NO: 50284
  REGION 1..119: note = Synthetic

SEQ ID NO: 50365 - protein, 119 aa, synthetic construct; identical to SEQ ID NO: 50294
  REGION 1..119: note = Synthetic

SEQ ID NO: 50366 - protein, 108 aa, synthetic construct; identical to SEQ ID NO: 50321
  REGION 1..108: note = Synthetic

SEQ ID NO: 50367 - protein, 109 aa, synthetic construct
  REGION 1..109: note = Synthetic
DSYELTQPPSVSVSPGQTASITCSGDKLGDKYAYWYQQKPGQSPVLVIYQDRKRPSGIPERFSGSNSGNTATLTISGTQAMDEADYYCQAWDNSTVVFGGGTKLTVLGG

SEQ ID NO: 50368 - protein, 114 aa, synthetic construct
  REGION 1..114: note = Synthetic
DIVMTQSPDSLAVSLGERATINCKSSQSVLYSSNNNNYLAWYQQKPGQPPKLLIYWASTRESGVPDRFSGSGSGTDFTLTISSLQAEDVAVYYCQQYYSTPPTFGQGTKVEIKR

SEQ ID NO: 50369 - protein, 108 aa, synthetic construct; identical to SEQ ID NO: 50320
  REGION 1..108: note = Synthetic

SEQ ID NO: 50370 - protein, 108 aa, synthetic construct
  REGION 1..108: note = Synthetic
DIQMTQSPSSLSASVGDRVTITCRASQGIRNNLGWYQQKPGKAPKRLIYAASSLQSGVPSRFSGSGSGTEFTLTISSLQPEDFATYYCLQYNSYPFTFGQGTKVEIKR

SEQ ID NO: 50371 - protein, 108 aa, synthetic construct
  REGION 1..108: note = Synthetic
DIQMTQSPSSLSASVGDRVTITCRASQGISNYLAWFQQKPGKAPKSLISAASSLQSGVPSKFSGSGSGTDFTLTISSLQPEDFATYYCQQYNSYPFTFGPGTKVDIKR

SEQ ID NO: 50372 - protein, 108 aa, synthetic construct
  REGION 1..108: note = Synthetic
DIQMTQSPSSLSASVGDRVTITCRASQDIRSDLGWYQQKPGKAPKRLIYAASSLQSGVPSRFSGSGSGTEFTLTISSLQPEDFATYYCLQHTIYPPTFGGGTKVEIKR

SEQ ID NO: 50373 - protein, 111 aa, synthetic construct
  REGION 1..111: note = Synthetic
  MOD_RES 3: note = Any amino acid
  MOD_RES 8: note = Any amino acid
  MOD_RES 10: note = Any amino acid
  MOD_RES 31..32: note = Any amino acid
  MOD_RES 34: note = Any amino acid
  MOD_RES 61..62: note = Any amino acid
  MOD_RES 82: note = Any amino acid
  MOD_RES 95: note = Any amino acid
  MOD_RES 97: note = Any amino acid
QSXLTQPXSXSGSPGQSITISCTGTSSDVGXXNXVSWYQQHPGKAPKLMIYEVSNRPSGVXXRFSGSKSGNTASLTISGLQXEDEADYYCSSYTXSXTVVFGGGTKLTVLG

SEQ ID NO: 50374 - protein, 109 aa, synthetic construct
  REGION 1..109: note = Synthetic
DIQMTQSPSSLSASVGDRVTITCRASQSISSYLNWYQQKPGKAPKLLIYAASSLQSGVPSRFSGSGSGTDFTLTISSLQPEDFATYYCQQSYRTPLFTFGPGTKVDIKR

SEQ ID NO: 50375 - protein, 108 aa, synthetic construct
  REGION 1..108: note = Synthetic
DIQMTQSPSSLSASVGDRVTITCRASQSIISYLNWYQQKPGKAPKLLIYTASSLQSGVPSRFSGSGSGTDFTLTISSLQPEDFATYYCQQTYSTPLTFGGGTKVEIKR

SEQ ID NO: 50376 - protein, 108 aa, synthetic construct; identical to SEQ ID NO: 50315
  REGION 1..108: note = Synthetic

SEQ ID NO: 50377 - protein, 108 aa, synthetic construct
  REGION 1..108: note = Synthetic
  MOD_RES 100: note = Any amino acid
DIQMTQSPSSLSASVGDRVTITCRASQGIRNDLGWYQQKPGKAPKRLIYAASSLQSGVPSRFSGSGSGTEFTLTISSLQPEDFATYYCLQHNSYPFTFGXGTKVEIKR

SEQ ID NO: 50378 - protein, 108 aa, synthetic construct; identical to SEQ ID NO: 50312
  REGION 1..108: note = Synthetic

SEQ ID NO: 50379 - protein, 108 aa, synthetic construct
  REGION 1..108: note = Synthetic
DIQMTQSPSSLSASVGDRVTITCRASQGIRNDLGWYQQKPGKAPKRLIYAASSLQSGVPSRFSGSGSGTEFTLTISSLQPEDFATYYCLQHSSYPLTFGGGTKVEIKR

SEQ ID NO: 50380 - protein, 108 aa, synthetic construct
  REGION 1..108: note = Synthetic
DIQMTQSPSSLSASVGDRVTITCRASQGIRNDLGWYQQKPGKAPKRLIYAASSVQSGVPSRFSGSGSGTEFTLTISSLQPEDFAIYYCLQHNSYPLTFGGGTKVEIKR

SEQ ID NO: 50381 - protein, 5 aa, synthetic construct
  REGION 1..5: note = Synthetic
DYYMH

SEQ ID NO: 50382 - protein, 17 aa, synthetic construct
  REGION 1..17: note = Synthetic
WINPNNGGTNYAQKFQG

SEQ ID NO: 50383 - protein, 8 aa, synthetic construct
  REGION 1..8: note = Synthetic
DGTGSFDY

SEQ ID NO: 50384 - protein, 5 aa, synthetic construct
  REGION 1..5: note = Synthetic
GYYMH

SEQ ID NO: 50385 - protein, 17 aa, synthetic construct
  REGION 1..17: note = Synthetic
WINPNSGGTNYAQKFQG

SEQ ID NO: 50386 - protein, 15 aa, synthetic construct
  REGION 1..15: note = Synthetic
SYYYGSGSYYNEFDY

SEQ ID NO: 50387 - protein, 5 aa, synthetic construct
  REGION 1..5: note = Synthetic
NYDIN

SEQ ID NO: 50388 - protein, 17 aa, synthetic construct
  REGION 1..17: note = Synthetic
WMHPNSGNTGYAQKFQG

SEQ ID NO: 50389 - protein, 9 aa, synthetic construct
  REGION 1..9: note = Synthetic
SSGWYYFDY

SEQ ID NO: 50390 - protein, 5 aa, synthetic construct
  REGION 1..5: note = Synthetic
SYSMN

SEQ ID NO: 50391 - protein, 17 aa, synthetic construct
  REGION 1..17: note = Synthetic
SISGSSSYIYYADSVKG

SEQ ID NO: 50392 - protein, 6 aa, synthetic construct
  REGION 1..6: note = Synthetic
VASFDY

SEQ ID NO: 50393 - protein, 5 aa, synthetic construct
  REGION 1..5: note = Synthetic
SYSMN

SEQ ID NO: 50394 - protein, 17 aa, synthetic construct
  REGION 1..17: note = Synthetic
SISGSSSYIYYADSVKG

SEQ ID NO: 50395 - protein, 5 aa, synthetic construct
  REGION 1..5: note = Synthetic
DRGSL

SEQ ID NO: 50396 - protein, 5 aa, synthetic construct
  REGION 1..5: note = Synthetic
SYVMN

SEQ ID NO: 50397 - protein, 17 aa, synthetic construct
  REGION 1..17: note = Synthetic
AISGSGGSTYYADSVKG

SEQ ID NO: 50398 - protein, 6 aa, synthetic construct
  REGION 1..6: note = Synthetic
TGVFDY

SEQ ID NO: 50399 - protein, 5 aa, synthetic construct
  REGION 1..5: note = Synthetic
SYAMS

SEQ ID NO: 50400 - protein, 17 aa, synthetic construct
  REGION 1..17: note = Synthetic
AISGRGGSTFHADSVKG

SEQ ID NO: 50401 - protein, 14 aa, synthetic construct
  REGION 1..14: note = Synthetic
GELLEDYYFYGMDV

SEQ ID NO: 50402 - protein, 5 aa, synthetic construct
  REGION 1..5: note = Synthetic
  MOD_RES 5: note = Any amino acid
SYAMX

SEQ ID NO: 50403 - protein, 17 aa, synthetic construct
  REGION 1..17: note = Synthetic
VISGRGGNTFYADSVKG

SEQ ID NO: 50404 - protein, 12 aa, synthetic construct
  REGION 1..12: note = Synthetic
RLAVAGSEAFDI

SEQ ID NO: 50405 - protein, 5 aa, synthetic construct
  REGION 1..5: note = Synthetic
SYGMH

SEQ ID NO: 50406 - protein, 17 aa, synthetic construct
  REGION 1..17: note = Synthetic
  MOD_RES 4: note = Any amino acid
VIWXDGSNKYYADSVKG

SEQ ID NO: 50407 - protein, 9 aa, synthetic construct
  REGION 1..9: note = Synthetic
DLSMGGMDV

SEQ ID NO: 50408 - protein, 5 aa, synthetic construct
  REGION 1..5: note = Synthetic
SYVMH

SEQ ID NO: 50409 - protein, 17 aa, synthetic construct
  REGION 1..17: note = Synthetic
VIWYDGSNKYYADSVKG

SEQ ID NO: 50410 - protein, 14 aa, synthetic construct
  REGION 1..14: note = Synthetic
EKYSSSWYDYGMDV

SEQ ID NO: 50411 - protein, 5 aa, synthetic construct
  REGION 1..5: note = Synthetic
DYGMH

SEQ ID NO: 50412 - protein, 17 aa, synthetic construct
  REGION 1..17: note = Synthetic
VIWYDESNKYYADSVKG

SEQ ID NO: 50413 - protein, 8 aa, synthetic construct
  REGION 1..8: note = Synthetic
EIGWLDDY

SEQ ID NO: 50414 - protein, 5 aa, synthetic construct
  REGION 1..5: note = Synthetic
DYGMH

SEQ ID NO: 50415 - protein, 17 aa, synthetic construct
  REGION 1..17: note = Synthetic
VIWYDENNKYYADSVKG

SEQ ID NO: 50416 - protein, 8 aa, synthetic construct
  REGION 1..8: note = Synthetic
ELGFRSDY

SEQ ID NO: 50417 - protein, 7 aa, synthetic construct
  REGION 1..7: note = Synthetic
RSSYYWG

SEQ ID NO: 50418 - protein, 16 aa, synthetic construct
  REGION 1..16: note = Synthetic
NIYYSGSTYYNPSLKS

SEQ ID NO: 50419 - protein, 9 aa, synthetic construct
  REGION 1..9: note = Synthetic
HSSSWSLDY

SEQ ID NO: 50420 - protein, 7 aa, synthetic construct
  REGION 1..7: note = Synthetic
RSSYYWG

SEQ ID NO: 50421 - protein, 16 aa, synthetic construct
  REGION 1..16: note = Synthetic
NIYYSGSTYYNPSLKS

SEQ ID NO: 50422 - protein, 9 aa, synthetic construct
  REGION 1..9: note = Synthetic
HGKDWGLDY

SEQ ID NO: 50423 - protein, 11 aa, synthetic construct
  REGION 1..11: note = Synthetic
RASQGISRWLA

SEQ ID NO: 50424 - protein, 7 aa, synthetic construct
  REGION 1..7: note = Synthetic
AASSLQS

SEQ ID NO: 50425 - protein, 9 aa, synthetic construct
  REGION 1..9: note = Synthetic
QQANSFPFT

SEQ ID NO: 50426 - protein, 11 aa, synthetic construct
  REGION 1..11: note = Synthetic
SGDKLGDKYAY

SEQ ID NO: 50427 - protein, 7 aa, synthetic construct
  REGION 1..7: note = Synthetic
QDRKRPS

SEQ ID NO: 50428 - protein, 9 aa, synthetic construct
  REGION 1..9: note = Synthetic
QAWDNSTVV

SEQ ID NO: 50429 - protein, 17 aa, synthetic construct
  REGION 1..17: note = Synthetic
KSSQSVLYSSNNNNYLA

SEQ ID NO: 50430 - protein, 7 aa, synthetic construct
  REGION 1..7: note = Synthetic
WASTRES

SEQ ID NO: 50431 - protein, 9 aa, synthetic construct
  REGION 1..9: note = Synthetic
QQYYSTPPT

SEQ ID NO: 50432 - protein, 11 aa, synthetic construct
  REGION 1..11: note = Synthetic
RASQGISNYLA

SEQ ID NO: 50433 - protein, 7 aa, synthetic construct
  REGION 1..7: note = Synthetic
AASSLQS

SEQ ID NO: 50434 - protein, 9 aa, synthetic construct
  REGION 1..9: note = Synthetic
QQYNSYPFT

SEQ ID NO: 50435 - protein, 11 aa, synthetic construct
  REGION 1..11: note = Synthetic
RASQGIRNNLG

SEQ ID NO: 50436 - protein, 7 aa, synthetic construct
  REGION 1..7: note = Synthetic
AASSLQS

SEQ ID NO: 50437 - protein, 9 aa, synthetic construct
  REGION 1..9: note = Synthetic
LQYNSYPFT

SEQ ID NO: 50438 - protein, 11 aa, synthetic construct
  REGION 1..11: note = Synthetic
RASQGISNYLA

SEQ ID NO: 50439 - protein, 7 aa, synthetic construct
  REGION 1..7: note = Synthetic
AASSLQS

SEQ ID NO: 50440 - protein, 9 aa, synthetic construct
  REGION 1..9: note = Synthetic
QQYNSYPFT

SEQ ID NO: 50441 - protein, 11 aa, synthetic construct
  REGION 1..11: note = Synthetic
RASQDIRSDLG

SEQ ID NO: 50442 - protein, 7 aa, synthetic construct
  REGION 1..7: note = Synthetic
AASSLQS

SEQ ID NO: 50443 - protein, 9 aa, synthetic construct
  REGION 1..9: note = Synthetic
LQHTIYPPT

SEQ ID NO: 50444 - protein, 14 aa, synthetic construct
  REGION 1..14: note = Synthetic
  MOD_RES 9..10: note = Any amino acid
  MOD_RES 12: note = Any amino acid
TGTSSDVGXXNXVS

SEQ ID NO: 50445 - protein, 7 aa, synthetic construct
  REGION 1..7: note = Synthetic
EVSNRPS

SEQ ID NO: 50446 - protein, 10 aa, synthetic construct
  REGION 1..10: note = Synthetic
  MOD_RES 5: note = Any amino acid
  MOD_RES 7: note = Any amino acid
SSYTXSXTVV

SEQ ID NO: 50447 - protein, 11 aa, synthetic construct
  REGION 1..11: note = Synthetic
RASQSISSYLN

SEQ ID NO: 50448 - protein, 7 aa, synthetic construct
  REGION 1..7: note = Synthetic
AASSLQS

SEQ ID NO: 50449 - protein, 10 aa, synthetic construct
  REGION 1..10: note = Synthetic
QQSYRTPLFT

SEQ ID NO: 50450 - protein, 11 aa, synthetic construct
  REGION 1..11: note = Synthetic
RASQSIISYLN

SEQ ID NO: 50451 - protein, 7 aa, synthetic construct
  REGION 1..7: note = Synthetic
TASSLQS

SEQ ID NO: 50452 - protein, 9 aa, synthetic construct
  REGION 1..9: note = Synthetic
QQTYSTPLT

SEQ ID NO: 50453 - protein, 11 aa, synthetic construct
  REGION 1..11: note = Synthetic
RASQGIRNDLG

SEQ ID NO: 50454 - protein, 7 aa, synthetic construct
  REGION 1..7: note = Synthetic
AASSLQS

SEQ ID NO: 50455 - protein, 9 aa, synthetic construct
  REGION 1..9: note = Synthetic
LQHYSYPRT

SEQ ID NO: 50456 - protein, 11 aa, synthetic construct
  REGION 1..11: note = Synthetic
RASQGIRNDLG

SEQ ID NO: 50457 - protein, 7 aa, synthetic construct
  REGION 1..7: note = Synthetic
AASSLQS

SEQ ID NO: 50458 - protein, 9 aa, synthetic construct
  REGION 1..9: note = Synthetic
LQHNSYPFT

SEQ ID NO: 50459 - protein, 11 aa, synthetic construct
  REGION 1..11: note = Synthetic
RASQGIRNDLG

SEQ ID NO: 50460 - protein, 7 aa, synthetic construct
  REGION 1..7: note = Synthetic
AASSLQS

SEQ ID NO: 50461 - protein, 9 aa, synthetic construct
  REGION 1..9: note = Synthetic
LQHNSYPLT

SEQ ID NO: 50462 - protein, 11 aa, synthetic construct
  REGION 1..11: note = Synthetic
RASQGIRNDLG

SEQ ID NO: 50463 - protein, 7 aa, synthetic construct
  REGION 1..7: note = Synthetic
AASSLQS

SEQ ID NO: 50464 - protein, 9 aa, synthetic construct
  REGION 1..9: note = Synthetic
LQHSSYPLT

SEQ ID NO: 50465 - protein, 11 aa, synthetic construct
  REGION 1..11: note = Synthetic
RASQGIRNDLG

SEQ ID NO: 50466 - protein, 7 aa, synthetic construct
  REGION 1..7: note = Synthetic
AASSVQS

SEQ ID NO: 50467 - protein, 9 aa, synthetic construct
  REGION 1..9: note = Synthetic
LQHNSYPLT

SEQ ID NO: 50468 - protein, 5 aa, synthetic construct
  REGION 1..5: note = Synthetic
NYDIN

SEQ ID NO: 50469 - protein, 17 aa, synthetic construct
  REGION 1..17: note = Synthetic
WMHPNSGNTGYAQKFQG

SEQ ID NO: 50470 - protein, 9 aa, synthetic construct
  REGION 1..9: note = Synthetic
SSGWYYFDY

SEQ ID NO: 50471 - protein, 5 aa, synthetic construct
  REGION 1..5: note = Synthetic
SYVMH

SEQ ID NO: 50472 - protein, 17 aa, synthetic construct
  REGION 1..17: note = Synthetic
VIWYDGSNKYYADSVKG

SEQ ID NO: 50473 - protein, 14 aa, synthetic construct
  REGION 1..14: note = Synthetic
ERYSSGWYDYGMDV

SEQ ID NO: 50474 - protein, 5 aa, synthetic construct
  REGION 1..5: note = Synthetic
DYGMH

SEQ ID NO: 50475 - protein, 17 aa, synthetic construct
  REGION 1..17: note = Synthetic
VIWYDENNKYYADSVKG

SEQ ID NO: 50476 - protein, 7 aa, synthetic construct
  REGION 1..7: note = Synthetic
ELGFSDY

SEQ ID NO: 50477 - protein, 5 aa, synthetic construct
  REGION 1..5: note = Synthetic
GCYWS

SEQ ID NO: 50478 - protein, 16 aa, synthetic construct
  REGION 1..16: note = Synthetic
EINHSGSTNYNPSLKS

SEQ ID NO: 50479 - protein, 7 aa, synthetic construct
  REGION 1..7: note = Synthetic
DYGGMDV

SEQ ID NO: 50480 - protein, 5 aa, synthetic construct
  REGION 1..5: note = Synthetic
NYDIN

SEQ ID NO: 50481 - protein, 17 aa, synthetic construct
  REGION 1..17: note = Synthetic
WMHPNSGNTGYAQKFQG

SEQ ID NO: 50482 - protein, 9 aa, synthetic construct
  REGION 1..9: note = Synthetic
SSGWYWFDP

SEQ ID NO: 50483 - protein, 5 aa, synthetic construct
  REGION 1..5: note = Synthetic
SYGMH

SEQ ID NO: 50484 - protein, 17 aa, synthetic construct
  REGION 1..17: note = Synthetic
VIWYDGSNKNYADSVKG

SEQ ID NO: 50485 - protein, 11 aa, synthetic construct
  REGION 1..11: note = Synthetic
DQGVGYYGLDV

SEQ ID NO: 50486 - protein, 5 aa, synthetic construct
  REGION 1..5: note = Synthetic
GYYMH

SEQ ID NO: 50487 - protein, 17 aa, synthetic construct
  REGION 1..17: note = Synthetic
WINPNSGGTNYAQKFQG

SEQ ID NO: 50488 - protein, 8 aa, synthetic construct
  REGION 1..8: note = Synthetic
DGTSSFDY

SEQ ID NO: 50489 - protein, 5 aa, synthetic construct
  REGION 1..5: note = Synthetic
SYGMH

SEQ ID NO: 50490 - protein, 17 aa, synthetic construct
  REGION 1..17: note = Synthetic
VIWHDGSNKYYADSVKG

SEQ ID NO: 50491 - protein, 9 aa, synthetic construct
  REGION 1..9: note = Synthetic
DLSMGGMDV

SEQ ID NO: 50492 - protein, 5 aa, synthetic construct
  REGION 1..5: note = Synthetic
DYGMH

SEQ ID NO: 50493 - protein, 17 aa, synthetic construct
  REGION 1..17: note = Synthetic
VIWYDESNKYYADSVKG

SEQ ID NO: 50494 - protein, 8 aa, synthetic construct
  REGION 1..8: note = Synthetic
EVGWLDDY

SEQ ID NO: 50495 - protein, 5 aa, synthetic construct
  REGION 1..5: note = Synthetic
SYSMN

SEQ ID NO: 50496 - protein, 17 aa, synthetic construct
  REGION 1..17: note = Synthetic
SISGSSSYIYYADSVKG

SEQ ID NO: 50497 - protein, 5 aa, synthetic construct
  REGION 1..5: note = Synthetic
DRGSS

SEQ ID NO: 50498 - protein, 5 aa, synthetic construct
  REGION 1..5: note = Synthetic
SYAMS

SEQ ID NO: 50499 - protein, 17 aa, synthetic construct
  REGION 1..17: note = Synthetic
VISGRGGNTFYADSVKG

SEQ ID NO: 50500 - protein, 12 aa, synthetic construct
  REGION 1..12: note = Synthetic
RIAVAGSEAFDI

SEQ ID NO: 50501 - protein, 5 aa, synthetic construct
  REGION 1..5: note = Synthetic
SYAMS

SEQ ID NO: 50502 - protein, 17 aa, synthetic construct
  REGION 1..17: note = Synthetic
AISGRGGSTFHADSVKG

SEQ ID NO: 50503 - protein, 14 aa, synthetic construct
  REGION 1..14: note = Synthetic
GELLEDYYFYGMDV

SEQ ID NO: 50504 - protein, 5 aa, synthetic construct
  REGION 1..5: note = Synthetic
SYGMH

SEQ ID NO: 50505 - protein, 17 aa, synthetic construct
  REGION 1..17: note = Synthetic
VIWYDGSNKYYADSVKG

SEQ ID NO: 50506 - protein, 20 aa, synthetic construct
  REGION 1..20: note = Synthetic
DRVYCSSTSCPYYYYYGMDV

SEQ ID NO: 50507 - protein, 5 aa, synthetic construct
  REGION 1..5: note = Synthetic
SYSMN

SEQ ID NO: 50508 - protein, 17 aa, synthetic construct
  REGION 1..17: note = Synthetic
SISGSSSYIYYADSVKG

SEQ ID NO: 50509 - protein, 6 aa, synthetic construct
  REGION 1..6: note = Synthetic
VASFDY

SEQ ID NO: 50510 - protein, 7 aa, synthetic construct
  REGION 1..7: note = Synthetic
SGDYYWN

SEQ ID NO: 50511 - protein, 16 aa, synthetic construct
  REGION 1..16: note = Synthetic
YIFYSGSTYYNPSLKS

SEQ ID NO: 50512 - protein, 17 aa, synthetic construct
  REGION 1..17: note = Synthetic
GDYDGSGSYHYYYGMDV

SEQ ID NO: 50513 - protein, 5 aa, synthetic construct
  REGION 1..5: note = Synthetic
SYAMS

SEQ ID NO: 50514 - protein, 17 aa, synthetic construct
  REGION 1..17: note = Synthetic
VISGGGSSTYYADSVKG

SEQ ID NO: 50515 - protein, 11 aa, synthetic construct
  REGION 1..11: note = Synthetic
WRGNPTDYGMD

SEQ ID NO: 50516 - protein, 5 aa, synthetic construct
  REGION 1..5: note = Synthetic
SYGMH

SEQ ID NO: 50517 - protein, 17 aa, synthetic construct
  REGION 1..17: note = Synthetic
IIWYDGSNKYYADSVKG

SEQ ID NO: 50518 - protein, 12 aa, synthetic construct
  REGION 1..12: note = Synthetic
DHYDFWSGHFDY

SEQ ID NO: 50519 - protein, 5 aa, synthetic construct
  REGION 1..5: note = Synthetic
GYYWS

SEQ ID NO: 50520 - protein, 16 aa, synthetic construct
  REGION 1..16: note = Synthetic
EINHSGRTNYNPSLKS

SEQ ID NO: 50521 - protein, 7 aa, synthetic construct
  REGION 1..7: note = Synthetic
DYGGLDY

SEQ ID NO: 50522 - protein, 7 aa, synthetic construct
  REGION 1..7: note = Synthetic
RSSYYWG

SEQ ID NO: 50523 - protein, 16 aa, synthetic construct
  REGION 1..16: note = Synthetic
NIYYSGSTYYNPSLKS

SEQ ID NO: 50524 - protein, 9 aa, synthetic construct
  REGION 1..9: note = Synthetic
HSSSWSLDY

SEQ ID NO: 50525 - protein, 5 aa, synthetic construct
  REGION 1..5: note = Synthetic
GYYIH

SEQ ID NO: 50526 - protein, 17 aa, synthetic construct
  REGION 1..17: note = Synthetic
WINPNSGGTNYAQKFQG

SEQ ID NO: 50527 - protein, 11 aa, synthetic construct
  REGION 1..11: note = Synthetic
GYSYGYNWFDP

SEQ ID NO: 50528 - protein, 5 aa, synthetic construct
  REGION 1..5: note = Synthetic
HYGMH

SEQ ID NO: 50529 - protein, 17 aa, synthetic construct
  REGION 1..17: note = Synthetic
VIWYDGSNKYYADSVKG

SEQ ID NO: 50530 - protein, 10 aa, synthetic construct
  REGION 1..10: note = Synthetic
GDWNPEGMDV

SEQ ID NO: 50531 - protein, 5 aa, synthetic construct
  REGION 1..5: note = Synthetic
SYAMS

SEQ ID NO: 50532 - protein, 17 aa, synthetic construct
  REGION 1..17: note = Synthetic
AISGSGGNTFYADSVKG

SEQ ID NO: 50533 - protein, 14 aa, synthetic construct
  REGION 1..14: note = Synthetic
KDYDYVWGSPYFDY

SEQ ID NO: 50534 - protein, 5 aa, synthetic construct
  REGION 1..5: note = Synthetic
GYYMH

SEQ ID NO: 50535 - protein, 17 aa, synthetic construct
  REGION 1..17: note = Synthetic
WINPNSGGTNYAQKFQG

SEQ ID NO: 50536 - protein, 15 aa, synthetic construct
  REGION 1..15: note = Synthetic
SYYYGSGSYYNEFDY

SEQ ID NO: 50537 - protein, 5 aa, synthetic construct
  REGION 1..5: note = Synthetic
GYYIH

SEQ ID NO: 50538 - protein, 17 aa, synthetic construct
  REGION 1..17: note = Synthetic
WINPYSGDTNYAQKFQG

SEQ ID NO: 50539 - protein, 14 aa, synthetic construct
  REGION 1..14: note = Synthetic
DWGGYSSYYYGMDV

SEQ ID NO: 50540 - protein, 5 aa, synthetic construct
  REGION 1..5: note = Synthetic
SYSMN

SEQ ID NO: 50541 - protein, 17 aa, synthetic construct
  REGION 1..17: note = Synthetic
SISGSSSYIYYADSVKG

SEQ ID NO: 50542 - protein, 5 aa, synthetic construct
  REGION 1..5: note = Synthetic
LTFDY

SEQ ID NO: 50543 - protein, 5 aa, synthetic construct
  REGION 1..5: note = Synthetic
TYGMH

SEQ ID NO: 50544 - protein, 17 aa, synthetic construct
  REGION 1..17: note = Synthetic
IIWYDGTNKYYADSVKG

SEQ ID NO: 50545 - protein, 13 aa, synthetic construct
  REGION 1..13: note = Synthetic
DPLRGYNDPVMDY

SEQ ID NO: 50546 - protein, 5 aa, synthetic construct
  REGION 1..5: note = Synthetic
SYAMS

SEQ ID NO: 50547 - protein, 17 aa, synthetic construct
  REGION 1..17: note = Synthetic
AISGRGGNTFYADSVKG

SEQ ID NO: 50548 - protein, 13 aa, synthetic construct
  REGION 1..13: note = Synthetic
RVTDYGGNDWFDP

SEQ ID NO: 50549 - protein, 5 aa, synthetic construct
  REGION 1..5: note = Synthetic
TYGMH

SEQ ID NO: 50550 - protein, 17 aa, synthetic construct
  REGION 1..17: note = Synthetic
VIWYGGSNKDYADSVKG

SEQ ID NO: 50551 - protein, 20 aa, synthetic construct
  REGION 1..20: note = Synthetic
DRDYCSGGSCPYYYYYGMDV

SEQ ID NO: 50552 - protein, 7 aa, synthetic construct
  REGION 1..7: note = Synthetic
RSSYYWG

SEQ ID NO: 50553 - protein, 16 aa, synthetic construct
  REGION 1..16: note = Synthetic
NIYYSGSTYYNPSLKS

SEQ ID NO: 50554 - protein, 9 aa, synthetic construct
  REGION 1..9: note = Synthetic
HGKDWGLDY

SEQ ID NO: 50555 - protein, 5 aa, synthetic construct
  REGION 1..5: note = Synthetic
GYYMH

SEQ ID NO: 50556 - protein, 17 aa, synthetic construct
  REGION 1..17: note = Synthetic
WIKPNSGGTNQAQKFQG

SEQ ID NO: 50557 - protein, 15 aa, synthetic construct
  REGION 1..15: note = Synthetic
APGTAAAGTWGYFDY

SEQ ID NO: 50558 - protein, 7 aa, synthetic construct
  REGION 1..7: note = Synthetic
TGGVGVG

SEQ ID NO: 50559 - protein, 16 aa, synthetic construct
  REGION 1..16: note = Synthetic
LIYWDDDKRYSPSLKS

SEQ ID NO: 50560 - protein, 8 aa, synthetic construct
  REGION 1..8: note = Synthetic
LIAVAFDY

SEQ ID NO: 50561 - protein, 5 aa, synthetic construct
  REGION 1..5: note = Synthetic
SYGMH

SEQ ID NO: 50562 - protein, 17 aa, synthetic construct
  REGION 1..17: note = Synthetic
IIWYDGSYKYYADSVKG

SEQ ID NO: 50563 - protein, 12 aa, synthetic construct
  REGION 1..12: note = Synthetic
EAYDFWSGYFDY

SEQ ID NO: 50564 - protein, 5 aa, synthetic construct
  REGION 1..5: note = Synthetic
SYGMH

SEQ ID NO: 50565 - protein, 17 aa, synthetic construct
  REGION 1..17: note = Synthetic
VIWYDGSNKYYADSVKG

SEQ ID NO: 50566 - protein, 11 aa, synthetic construct
  REGION 1..11: note = Synthetic
DRDYGDYGMDV

SEQ ID NO: 50567 - protein, 5 aa, synthetic construct
  REGION 1..5: note = Synthetic
SYAMS

SEQ ID NO: 50568 - protein, 17 aa, synthetic construct
  REGION 1..17: note = Synthetic
AISGSGGNTFYADSVKG

SEQ ID NO: 50569 - protein, 12 aa, synthetic construct
  REGION 1..12: note = Synthetic
LGKDYYYYGMDV

SEQ ID NO: 50570 - protein, 5 aa, synthetic construct
  REGION 1..5: note = Synthetic
SYVMS

SEQ ID NO: 50571 - protein, 17 aa, synthetic construct
  REGION 1..17: note = Synthetic
AMSGSGGRTYYADSVKG

SEQ ID NO: 50572 - protein, 6 aa, synthetic construct
  REGION 1..6: note = Synthetic
LTAFDY

SEQ ID NO: 50573 - protein, 5 aa, synthetic construct
  REGION 1..5: note = Synthetic
SYGMH

SEQ ID NO: 50574 - protein, 17 aa, synthetic construct
  REGION 1..17: note = Synthetic
IISYAGSNKYYADSVKG

SEQ ID NO: 50575 - protein, 12 aa, synthetic construct
  REGION 1..12: note = Synthetic
RGYSYGGYGMDV

SEQ ID NO: 50576 - protein, 5 aa, synthetic construct
  REGION 1..5: note = Synthetic
DYVMH

SEQ ID NO: 50577 - protein, 17 aa, synthetic construct
  REGION 1..17: note = Synthetic
VIWYDGSNKYYADSVKG

SEQ ID NO: 50578 - protein, 14 aa, synthetic construct
  REGION 1..14: note = Synthetic
EPYTSGWYDYGMDV

SEQ ID NO: 50579 - protein, 5 aa, synthetic construct
  REGION 1..5: note = Synthetic
SYGIS

SEQ ID NO: 50580 - protein, 17 aa, synthetic construct
  REGION 1..17: note = Synthetic
WISAYNGNTKYAQKLQG

SEQ ID NO: 50581 - protein, 13 aa, synthetic construct
  REGION 1..13: note = Synthetic
HDFWSGYYKGMDV

SEQ ID NO: 50582 - protein, 5 aa, synthetic construct
  REGION 1..5: note = Synthetic
SYAMS

SEQ ID NO: 50583 - protein, 17 aa, synthetic construct
  REGION 1..17: note = Synthetic
AISGRGGNTFDADSVKG

SEQ ID NO: 50584 - protein, 9 aa, synthetic construct
  REGION 1..9: note = Synthetic
ERSGSYFDY

SEQ ID NO: 50585 - protein, 5 aa, synthetic construct
  REGION 1..5: note = Synthetic
NYGMH

SEQ ID NO: 50586 - protein, 17 aa, synthetic construct
  REGION 1..17: note = Synthetic
VIWHDGSNKYYADSVKG

SEQ ID NO: 50587 - protein, 21 aa, synthetic construct
  REGION 1..21: note = Synthetic
ENSSSYYFDYWGQGTLVTVSS

SEQ ID NO: 50588 - protein, 7 aa, synthetic construct
  REGION 1..7: note = Synthetic
TSGVGVG

SEQ ID NO: 50589 - protein, 16 aa, synthetic construct
  REGION 1..16: note = Synthetic
LINWNDDKRYSPSLKS

SEQ ID NO: 50590 - protein, 9 aa, synthetic construct
  REGION 1..9: note = Synthetic
KATWVAFDI

SEQ ID NO: 50591 - protein, 5 aa, synthetic construct
  REGION 1..5: note = Synthetic
SYVMN

SEQ ID NO: 50592 - protein, 17 aa, synthetic construct
  REGION 1..17: note = Synthetic
AISGSGGRTYYADSVKG

SEQ ID NO: 50593 - protein, 6 aa, synthetic construct
  REGION 1..6: note = Synthetic
TATFDY

SEQ ID NO: 50594 - protein, 5 aa, synthetic construct
  REGION 1..5: note = Synthetic
SYAMS

SEQ ID NO: 50595 - protein, 17 aa, synthetic construct
  REGION 1..17: note = Synthetic
VISGRGGTTFYADSVKG

SEQ ID NO: 50596 - protein, 10 aa, synthetic construct
  REGION 1..10: note = Synthetic
KRTPSDVFDI

SEQ ID NO: 50597 - protein, 5 aa, synthetic construct
  REGION 1..5: note = Synthetic
SYGMH

SEQ ID NO: 50598 - protein, 17 aa, synthetic construct
  REGION 1..17: note = Synthetic
VIWYDGSNKYYADSVKG

SEQ ID NO: 50599 - protein, 10 aa, synthetic construct
  REGION 1..10: note = Synthetic
DRPRSSAFDY

SEQ ID NO: 50600 - protein, 5 aa, synthetic construct
  REGION 1..5: note = Synthetic
SYNMN

SEQ ID NO: 50601 - protein, 17 aa, synthetic construct
  REGION 1..17: note = Synthetic
YISRSSNTKYYADSVKG

SEQ ID NO: 50602 - protein, 16 aa, synthetic construct
  REGION 1..16: note = Synthetic
DRSGSYGYFYYYGLDV

SEQ ID NO: 50603 - protein, 7 aa, synthetic construct
  REGION 1..7: note = Synthetic
SGGDYWS

SEQ ID NO: 50604 - protein, 16 aa, synthetic construct
  REGION 1..16: note = Synthetic
YIYYSGSTYYNPSLKS

SEQ ID NO: 50605 - protein, 9 aa, synthetic construct
  REGION 1..9: note = Synthetic
DSSSYGMDV

SEQ ID NO: 50606 - protein, 11 aa, synthetic construct
  REGION 1..11: note = Synthetic
RASQGIRNDLG

SEQ ID NO: 50607 - protein, 7 aa, synthetic construct
  REGION 1..7: note = Synthetic
AASSLQS

SEQ ID NO: 50608 - protein, 9 aa, synthetic construct
  REGION 1..9: note = Synthetic
LQHNSYPLT

SEQ ID NO: 50609 - protein, 11 aa, synthetic construct
  REGION 1..11: note = Synthetic
SGDKLGDKYAC

SEQ ID NO: 50610 - protein, 7 aa, synthetic construct
  REGION 1..7: note = Synthetic
QDRKRPS

SEQ ID NO: 50611 - protein, 9 aa, synthetic construct
  REGION 1..9: note = Synthetic
QAWDSSTVV

SEQ ID NO: 50612 - protein, 12 aa, synthetic construct
  REGION 1..12: note = Synthetic
RASQSVYSSYLA

SEQ ID NO: 50613 - protein, 7 aa, synthetic construct
  REGION 1..7: note = Synthetic
GASSRAT

SEQ ID NO: 50614 - protein, 9 aa, synthetic construct
  REGION 1..9: note = Synthetic
QQYDNSPWT

SEQ ID NO: 50615 - protein, 11 aa, synthetic construct
  REGION 1..11: note = Synthetic
RASQGIRNDLG

SEQ ID NO: 50616 - protein, 7 aa, synthetic construct
  REGION 1..7: note = Synthetic
AASSLQS

SEQ ID NO: 50617 - protein, 9 aa, synthetic construct
  REGION 1..9: note = Synthetic
LQHYSYPRT

SEQ ID NO: 50618 - protein, 17 aa, synthetic construct
  REGION 1..17: note = Synthetic
KSSQSVLHSSNNNNYLA

SEQ ID NO: 50619 - protein, 7 aa, synthetic construct
  REGION 1..7: note = Synthetic
WASTRES

SEQ ID NO: 50620 - protein, 9 aa, synthetic construct
  REGION 1..9: note = Synthetic
QQYYSTPPT

SEQ ID NO: 50621 - protein, 11 aa, synthetic construct
  REGION 1..11: note = Synthetic
RASQGIRNDLG

SEQ ID NO: 50622 - protein, 7 aa, synthetic construct
  REGION 1..7: note = Synthetic
AASSLQS

SEQ ID NO: 50623 - protein, 9 aa, synthetic construct
  REGION 1..9: note = Synthetic
LQHNSYPFT

SEQ ID NO: 50624 - protein, 11 aa, synthetic construct
  REGION 1..11: note = Synthetic
RASQGISNYLA

SEQ ID NO: 50625 - protein, 7 aa, synthetic construct
  REGION 1..7: note = Sythetic
AASSLQS

SEQ ID NO: 50626 - protein, 9 aa, synthetic construct
  REGION 1..9: note = Synthetic
QQYSTYPLT

SEQ ID NO: 50627 - protein, 11 aa, synthetic construct
  REGION 1..11: note = Synthetic
RASQNIISYLN

SEQ ID NO: 50628 - protein, 7 aa, synthetic construct
  REGION 1..7: note = Synthetic
TASSLQS

SEQ ID NO: 50629 - protein, 9 aa, synthetic construct
  REGION 1..9: note = Synthetic
QQSYSTPLT

SEQ ID NO: 50630 - protein, 11 aa, synthetic construct
  REGION 1..11: note = Synthetic
RASQGISNYLA

SEQ ID NO: 50631 - protein, 7 aa, synthetic construct
  REGION 1..7: note = Synthetic
AASSLQS

SEQ ID NO: 50632 - protein, 9 aa, synthetic construct
  REGION 1..9: note = Synthetic
QQYNSYPFT

SEQ ID NO: 50633 - protein, 11 aa, synthetic construct
  REGION 1..11: note = Synthetic
RASQGISRWLA

SEQ ID NO: 50634 - protein, 7 aa, synthetic construct
  REGION 1..7: note = Synthetic
AASSLQS

SEQ ID NO: 50635 - protein, 9 aa, synthetic construct
  REGION 1..9: note = Synthetic
QQANSFPFT

SEQ ID NO: 50636 - protein, 16 aa, synthetic construct
  REGION 1..16: note = Synthetic
KSSQSLLHGDGKTYLY

SEQ ID NO: 50637 - protein, 7 aa, synthetic construct
  REGION 1..7: note = Synthetic
EVSNRFS

SEQ ID NO: 50638 - protein, 9 aa, synthetic construct
  REGION 1..9: note = Synthetic
MQSIQLPWT

SEQ ID NO: 50639 - protein, 11 aa, synthetic construct
  REGION 1..11: note = Synthetic
RASQSISSYLN

SEQ ID NO: 50640 - protein, 7 aa, synthetic construct
  REGION 1..7: note = Synthetic
AASSLQS

SEQ ID NO: 50641 - protein, 9 aa, synthetic construct
  REGION 1..9: note = Synthetic
QQSYSPPFT

SEQ ID NO: 50642 - protein, 17 aa, synthetic construct
  REGION 1..17: note = Synthetic
KSSQSVLYSSNNNNYLA

SEQ ID NO: 50643 - protein, 7 aa, synthetic construct
  REGION 1..7: note = Synthetic
WASTRES

SEQ ID NO: 50644 - protein, 9 aa, synthetic construct
  REGION 1..9: note = Synthetic
QQYYSTPCS

SEQ ID NO: 50645 - protein, 11 aa, synthetic construct
  REGION 1..11: note = Synthetic
RASQGISNWLA

SEQ ID NO: 50646 - protein, 7 aa, synthetic construct
  REGION 1..7: note = Synthetic
AASSLQS

SEQ ID NO: 50647 - protein, 9 aa, synthetic construct
  REGION 1..9: note = Synthetic
QQANSFPWT

SEQ ID NO: 50648 - protein, 17 aa, synthetic construct
  REGION 1..17: note = Synthetic
KSSQSVLHSSNNNNYLA

SEQ ID NO: 50649 - protein, 7 aa, synthetic construct
  REGION 1..7: note = Synthetic
WASTRES

SEQ ID NO: 50650 - protein, 9 aa, synthetic construct
  REGION 1..9: note = Synthetic
QQYYSTPVT

SEQ ID NO: 50651 - protein, 14 aa, synthetic construct
  REGION 1..14: note = Synthetic
ASSTGAVTSGYYPN

SEQ ID NO: 50652 - protein, 7 aa, synthetic construct
  REGION 1..7: note = Synthetic
STSNKHS

SEQ ID NO: 50653 - protein, 10 aa, synthetic construct
  REGION 1..10: note = Synthetic
LLYYGGAQLV

SEQ ID NO: 50654 - protein, 11 aa, synthetic construct
  REGION 1..11: note = Synthetic
RASQSVNSNLA

SEQ ID NO: 50655 - protein, 7 aa, synthetic construct
  REGION 1..7: note = Synthetic
GASTRAT

SEQ ID NO: 50656 - protein, 9 aa, synthetic construct
  REGION 1..9: note = Synthetic
QQYNDWPCS

SEQ ID NO: 50657 - protein, 12 aa, synthetic construct
  REGION 1..12: note = Synthetic
RASQSVSSSYLV

SEQ ID NO: 50658 - protein, 7 aa, synthetic construct
  REGION 1..7: note = Synthetic
GASTRAT

SEQ ID NO: 50659 - protein, 9 aa, synthetic construct
  REGION 1..9: note = Synthetic
QQYGCSPLT

SEQ ID NO: 50660 - protein, 16 aa, synthetic construct
  REGION 1..16: note = Synthetic
KSSQSLLHSEGKTYLY

SEQ ID NO: 50661 - protein, 7 aa, synthetic construct
  REGION 1..7: note = Synthetic
EVSNRFS

SEQ ID NO: 50662 - protein, 9 aa, synthetic construct
  REGION 1..9: note = Synthetic
MQSIQLPLT

SEQ ID NO: 50663 - protein, 14 aa, synthetic construct
  REGION 1..14: note = Synthetic
TGTSSDVGGYNYVS

SEQ ID NO: 50664 - protein, 7 aa, synthetic construct
  REGION 1..7: note = Synthetic
EVSNRPS

SEQ ID NO: 50665 - protein, 10 aa, synthetic construct
  REGION 1..10: note = Synthetic
NSYTRSITWV

SEQ ID NO: 50666 - protein, 11 aa, synthetic construct
  REGION 1..11: note = Synthetic
RASQSISNYLN

SEQ ID NO: 50667 - protein, 7 aa, synthetic construct
  REGION 1..7: note = Synthetic
AASSLQS

SEQ ID NO: 50668 - protein, 10 aa, synthetic construct
  REGION 1..10: note = Synthetic
QQSYSTPTWT

SEQ ID NO: 50669 - protein, 11 aa, synthetic construct
  REGION 1..11: note = Synthetic
RASQGISSWLA

SEQ ID NO: 50670 - protein, 7 aa, synthetic construct
  REGION 1..7: note = Synthetic
AASSLQS

SEQ ID NO: 50671 - protein, 9 aa, synthetic construct
  REGION 1..9: note = Synthetic
QQINSFPLT

SEQ ID NO: 50672 - protein, 11 aa, synthetic construct
  REGION 1..11: note = Synthetic
QASQDINNYLN

SEQ ID NO: 50673 - protein, 7 aa, synthetic construct
  REGION 1..7: note = Synthetic
DASNLET

SEQ ID NO: 50674 - protein, 9 aa, synthetic construct
  REGION 1..9: note = Synthetic
QQYDNLPIT

SEQ ID NO: 50675 - protein, 13 aa, synthetic construct
  REGION 1..13: note = Synthetic
SGSSSNIGNNYVS

SEQ ID NO: 50676 - protein, 7 aa, synthetic construct
  REGION 1..7: note = Synthetic
DNNKRPS

SEQ ID NO: 50677 - protein, 11 aa, synthetic construct
  REGION 1..11: note = Synthetic
GTWDSSLSVGV

SEQ ID NO: 50678 - protein, 16 aa, synthetic construct
  REGION 1..16: note = Synthetic
RSSQSLLHSNGYNYLD

SEQ ID NO: 50679 - protein, 7 aa, synthetic construct
  REGION 1..7: note = Synthetic
LGSNRAS

SEQ ID NO: 50680 - protein, 9 aa, synthetic construct
  REGION 1..9: note = Synthetic
MQALHPPLT

SEQ ID NO: 50681 - protein, 13 aa, synthetic construct
  REGION 1..13: note = Synthetic
SGSSSNIGSNTVN

SEQ ID NO: 50682 - protein, 7 aa, synthetic construct
  REGION 1..7: note = Synthetic
SNNQRPS

SEQ ID NO: 50683 - protein, 11 aa, synthetic construct
  REGION 1..11: note = Synthetic
AAWDDSLNGVV

SEQ ID NO: 50684 - protein, 13 aa, synthetic construct
  REGION 1..13: note = Synthetic
SGSSSNIGSNIVT

SEQ ID NO: 50685 - protein, 7 aa, synthetic construct
  REGION 1..7: note = Synthetic
SNDQRPS

SEQ ID NO: 50686 - protein, 11 aa, synthetic construct
  REGION 1..11: note = Synthetic
AAWDDSLNGWV

SEQ ID NO: 50687 - protein, 11 aa, synthetic construct
  REGION 1..11: note = Synthetic
RASQGIRNDLG

SEQ ID NO: 50688 - protein, 7 aa, synthetic construct
  REGION 1..7: note = Synthetic
AASSLQS

SEQ ID NO: 50689 - protein, 9 aa, synthetic construct
  REGION 1..9: note = Synthetic
LQHNSYPIT

SEQ ID NO: 50690 - protein, 11 aa, synthetic construct
  REGION 1..11: note = Synthetic
RASQSISSYLN

SEQ ID NO: 50691 - protein, 7 aa, synthetic construct
  REGION 1..7: note = Synthetic
AASSLQS

SEQ ID NO: 50692 - protein, 9 aa, synthetic construct
  REGION 1..9: note = Synthetic
QQSYSIPIT

SEQ ID NO: 50693 - protein, 16 aa, synthetic construct
  REGION 1..16: note = Synthetic
KSSQSLLHSEGKTYLY

SEQ ID NO: 50694 - protein, 7 aa, synthetic construct
  REGION 1..7: note = Synthetic
EVSNRFS

SEQ ID NO: 50695 - protein, 9 aa, synthetic construct
  REGION 1..9: note = Synthetic
MQSIQLPIT

SEQ ID NO: 50696 - protein, 12 aa, synthetic construct
  REGION 1..12: note = Synthetic
RASQSVISSYLA

SEQ ID NO: 50697 - protein, 7 aa, synthetic construct
  REGION 1..7: note = Synthetic
GVSSRAT

SEQ ID NO: 50698 - protein, 9 aa, synthetic construct
  REGION 1..9: note = Synthetic
QQYGRSPFN

SEQ ID NO: 50699 - protein, 11 aa, synthetic construct
  REGION 1..11: note = Synthetic
RASQSVSSNLA

SEQ ID NO: 50700 - protein, 7 aa, synthetic construct
  REGION 1..7: note = Synthetic
GASTRAT

SEQ ID NO: 50701 - protein, 9 aa, synthetic construct
  REGION 1..9: note = Synthetic
QQYNDWPWT

SEQ ID NO: 50702 - protein, 11 aa, synthetic construct
  REGION 1..11: note = Synthetic
RASQSIGSSLH

SEQ ID NO: 50703 - protein, 7 aa, synthetic construct
  REGION 1..7: note = Synthetic
YASQSFS

SEQ ID NO: 50704 - protein, 9 aa, synthetic construct
  REGION 1..9: note = Synthetic
HQSSSLPWT

SEQ ID NO: 50705 - protein, 11 aa, synthetic construct
  REGION 1..11: note = Synthetic
RASQGIRNDLG

SEQ ID NO: 50706 - protein, 7 aa, synthetic construct
  REGION 1..7: note = Synthetic
AASSLQS

SEQ ID NO: 50707 - protein, 9 aa, synthetic construct
  REGION 1..9: note = Synthetic
LQHYSYPRS

SEQ ID NO: 50708 - protein, 11 aa, synthetic construct
  REGION 1..11: note = Synthetic
RASQGISNYLA

SEQ ID NO: 50709 - protein, 7 aa, synthetic construct
  REGION 1..7: note = Synthetic
AASSLQS

SEQ ID NO: 50710 - protein, 9 aa, synthetic construct
  REGION 1..9: note = Synthetic
QQYLSYPIT

SEQ ID NO: 50711 - protein, 11 aa, synthetic construct
  REGION 1..11: note = Synthetic
RASQSIGSSLH

SEQ ID NO: 50712 - protein, 7 aa, synthetic construct
  REGION 1..7: note = Synthetic
YASQSFS

SEQ ID NO: 50713 - protein, 9 aa, synthetic construct
  REGION 1..9: note = Synthetic
HQSRRLPLT

SEQ ID NO: 50714 - protein, 11 aa, synthetic construct
  REGION 1..11: note = Synthetic
QGDSLRPYYAS

SEQ ID NO: 50715 - protein, 7 aa, synthetic construct
  REGION 1..7: note = Synthetic
GKNNRPS

SEQ ID NO: 50716 - protein, 12 aa, synthetic construct
  REGION 1..12: note = Synthetic
NSRDSSGNHLVV

SEQ ID NO: 50717 - protein, 16 aa, synthetic construct
  REGION 1..16: note = Synthetic
RSSQSLVYSDGNTYLN

SEQ ID NO: 50718 - protein, 7 aa, synthetic construct
  REGION 1..7: note = Synthetic
KVSNWDS

SEQ ID NO: 50719 - protein, 9 aa, synthetic construct
  REGION 1..9: note = Synthetic
MQGTHWPLT

SEQ ID NO: 50720 - protein, 11 aa, synthetic construct
  REGION 1..11: note = Synthetic
RASQSVSRNLA

SEQ ID NO: 50721 - protein, 7 aa, synthetic construct
  REGION 1..7: note = Synthetic
GASTRAT

SEQ ID NO: 50722 - protein, 9 aa, synthetic construct
  REGION 1..9: note = Synthetic
QQYNNWPLT

SEQ ID NO: 50723 - protein, 11 aa, synthetic construct
  REGION 1..11: note = Synthetic
GGNNIGRKNVH

SEQ ID NO: 50724 - protein, 7 aa, synthetic construct
  REGION 1..7: note = Synthetic
RDSDRPS

SEQ ID NO: 50725 - protein, 9 aa, synthetic construct
  REGION 1..9: note = Synthetic
QVWDSSTVV

SEQ ID NO: 50726 - protein, 9 aa, synthetic construct
  REGION 1..9: note = Synthetic
LHQYSYPRT

SEQ ID NO: 50727 - protein, 13 aa, synthetic construct
  REGION 1..13: note = Synthetic
RETYNWNYEGFDY

SEQ ID NO: 50728 - protein, 11 aa, synthetic construct
  REGION 1..11: note = Synthetic
SGDALPKKYAY

SEQ ID NO: 50729 - protein, 11 aa, synthetic construct
  REGION 1..11: note = Synthetic
NSTDSSGNHVV

SEQ ID NO: 50730 - protein, 4 aa, synthetic construct
  REGION 1..4: note = Synthetic
KFGD

SEQ ID NO: 50731 - protein, 5 aa, synthetic construct
  REGION 1..5: note = Synthetic
VYYLN

SEQ ID NO: 50732 - protein, 7 aa, synthetic construct
  REGION 1..7: note = Synthetic
GYDILTG

SEQ ID NO: 50733 - protein, 5 aa, synthetic construct
  REGION 1..5: note = Synthetic
SYSWS

SEQ ID NO: 50734 - protein, 16 aa, synthetic construct
  REGION 1..16: note = Synthetic
RIYTSGSTNYIPSLKS

SEQ ID NO: 50735 - protein, 12 aa, synthetic construct
  REGION 1..12: note = Synthetic
DLKSSGCLFFDY

SEQ ID NO: 50736 - protein, 8 aa, synthetic construct
  REGION 1..8: note = Synthetic
GGSRGFDP

SEQ ID NO: 50737 - protein, 11 aa, synthetic construct
  REGION 1..11: note = Synthetic
NRGVGYYGLDV

SEQ ID NO: 50738 - protein, 16 aa, synthetic construct
  REGION 1..16: note = Synthetic
EINLSGSTNYNPSLKS

SEQ ID NO: 50739 - protein, 10 aa, synthetic construct
  REGION 1..10: note = Synthetic
WYYYYYGMDV

SEQ ID NO: 50740 - protein, 5 aa, synthetic construct
  REGION 1..5: note = Synthetic
GYFWT

SEQ ID NO: 50741 - protein, 6 aa, synthetic construct
  REGION 1..6: note = Synthetic
DYGADY

SEQ ID NO: 50742 - protein, 8 aa, synthetic construct
  REGION 1..8: note = Synthetic
TYSGGMDV

SEQ ID NO: 50743 - protein, 5 aa, synthetic construct
  REGION 1..5: note = Synthetic
SYDIN

SEQ ID NO: 50744 - protein, 17 aa, synthetic construct
  REGION 1..17: note = Synthetic
WMNPKRGNTGYAQKFQG

SEQ ID NO: 50745 - protein, 16 aa, synthetic construct
  REGION 1..16: note = Synthetic
GRYSREDYYYYYDMDV

SEQ ID NO: 50746 - protein, 10 aa, synthetic construct
  REGION 1..10: note = Synthetic
QQSYRTPLFT

SEQ ID NO: 50747 - protein, 17 aa, synthetic construct
  REGION 1..17: note = Synthetic
IISYVGKNKYYADSVKG

SEQ ID NO: 50748 - protein, 7 aa, synthetic construct
  REGION 1..7: note = Synthetic
DYGAFDI

SEQ ID NO: 50749 - protein, 4 aa, synthetic construct
  REGION 1..4: note = Synthetic
LGDY

SEQ ID NO: 50750 - protein, 9 aa, synthetic construct
  REGION 1..9: note = Synthetic
MQALQTPIT

SEQ ID NO: 50751 - protein, 6 aa, synthetic construct
  REGION 1..6: note = Synthetic
  SITE 1: note = MISC_FEATURE - X = S or R
  SITE 3: note = MISC_FEATURE - X = Y or S
XSXAMS

SEQ ID NO: 50752-50753 - skipped (2 entries)

SEQ ID NO: 50754 - protein, 19 aa, synthetic construct
  REGION 1..19: note = Synthetic
EAQVKGLSTQGGNVGRKMK

SEQ ID NO: 50755 - DNA, 57 bp, synthetic construct
  misc_feature 1..57: note = Synthetic
  source 1..57: mol_type = other DNA
gaggcccaggtcaagggcttgagcacccagggaggcaatgtgggaagaaagatgaag

SEQ ID NO: 50756 - DNA, 35 bp, synthetic construct
  misc_feature 1..35: note = Synthetic
  source 1..35: mol_type = other DNA
gaggcccaggaggcaatgtgggaagaaagatgaag

SEQ ID NO: 50757 - protein, 10 aa, synthetic construct
  REGION 1..10: note = Synthetic
EAQEAMWEER

SEQ ID NO: 50758 - DNA, 32 bp, synthetic construct
  misc_feature 1..32: note = Synthetic
  source 1..32: mol_type = other DNA
cccaggtcaagggcttgagcacccagggtgag

SEQ ID NO: 50759 - protein, 105 aa, synthetic construct; identical to SEQ ID NO: 78
  REGION 1..105: note = Synthetic
